(19) United States
(12) Patent Application Publication
(10) Pub. No.: US 2024/0254491 A1
(43) Pub. Date: Aug. 1, 2024

(54) BETA-CATENIN (CTNNB1) iRNA COMPOSITIONS AND METHODS OF USE THEREOF

(71) Applicant: Alnylam Pharmaceuticals, Inc., Cambridge, MA (US)

(72) Inventors: Akin Akinc, Needham, MA (US); Jeffrey Zuber, Somerville, MA (US)

(21) Appl. No.: 18/581,511

(22) Filed: Feb. 20, 2024

Related U.S. Application Data
(63) Continuation of application No. 18/405,072, filed on Jan. 5, 2024.
Application No. 18/405,072 is a continuation of application No. PCT/US22/37794, filed on Jul. 21, 2022.
(60) Provisional application No. 63/224,901, filed on Jul. 23, 2021.
(60) Provisional application No. 63/293,851, filed on Dec. 27, 2021.

(51) Int. Cl. C12N 15/113; A61K 31/713; A61K 47/14; A61K 47/18; A61K 47/28

(52) U.S. Cl. CPC C12N 15/113; A61K 31/713; A61K 47/14; A61K 47/18; A61K 47/28; C12N 2310/14; C12N 2310/312; C12N 2310/315; C12N 2310/321; C12N 2310/322

(57) ABSTRACT

The present invention relates to RNAi agents, e.g., double stranded RNA (dsRNA) agents, targeting the beta-catenin (CTNNB1) gene. The invention also relates to methods of using such RNAi agents to inhibit expression of a CTNNB1 gene and to methods of preventing and treating a CTNNB1-associated disorder, e.g., cancer, e.g., hepatocellular carcinoma.

### RELATED APPLICATIONS

[0001] This application is a continuation of Ser. No. 18/405,072, filed on Jan. 5, 2024, which is a 35 § U.S.C. 111(a) continuation application which claims the benefit of priority to PCT/US2022/037794, filed on Jul. 21, 2022, which, in turn, claims the benefit of priority to U.S. Provisional Applicaton No. 63/224,901, filed on Jul. 23, 2021, and U.S. Provisional Applicaton No. 63/293,851, filed on Dec. 27, 2021. The entire contents of each of the foregoing applications are incorporated herein by reference.

### SEQUENCE LISTING

[0002] The instant application contains a Sequence Listing which has been filed electronically in XML file format and is hereby incorporated by reference in its entirety. Said XML copy, created on Feb. 16, 2024, is named 121301_16104_SL.xml and is 12,503,926 bytes in size.

### BACKGROUND OF THE INVENTION

[0003] Wnt/β-catenin signaling is an evolutionarily conserved and versatile pathway that is known to be involved in embryonic development, tissue homeostasis and a wide variety of human diseases.

[0004] Aberrant activation of this pathway gives rise to the accumulation of β-catenin in the nucleus and promotes the transcription of many oncogenes such as c-Myc and CyclinD-1. As a result, it contributes to carcinogenesis and tumor progression of several cancers, including hepatocellular carcinoma, colon cancer, pancreatic cancer, lung cancer and ovarian cancer (Khramtsov A I, et al. Am J Pathol. 2010; 176:2911-2920; Tao J, et al. Gastroenterology. 2014; 147:690-701; Kobayashi M, et al. Br J Cancer. 2000; 82:1689-1693; Damsky W E, et al. Cancer Cell. 2011; 20:741-754; Gekas C, et al. Leukemia. 2016; 30:2002-2010).

[0005] β-catenin, encoded by the CTNNB1 gene, is a multifunctional protein with a central role in physiological homeostasis. β-catenin acts both as a transcriptional co-regulator and an adaptor protein for intracellular adhesion. Wnt is the chief regulator of β-catenin, which is a family of 19 glycoproteins to regulate both the β-catenin-dependent (canonical Wnt) and -independent (non-canonical Wnt) signaling pathways (van Ooyen A, Nusse R. Cell. 1984; 39:233-240).

[0006] In canonical Wnt pathway, Dsh, β-catenin, Glycogen Synthase Kinase 3 beta (GSK3β), adenomatous polyposis coli (APC), AXIN, and T-cell factor (TCF)/lymphoid enhancement factor (LEF) have been identified as signal transducers of the canonical Wnt pathway, in which β-catenin is a core molecule (Behrens J, et al. Nature. 1996; 382:638-642; Peifer M, et al. Dev Biol. 1994; 166:543-556; Rubinfeld B, et al. Science. 1996; 272:1023-1026; Yost C, et al., Genes Dev. 1996; 10:1443-1454). In the absence of Wnt ligands, β-catenin is kept at a low level through the ubiquitin proteasome system (UPS) which results in the ubiquitylation and proteasomal degradation of β-catenin. Upon Wnt activation or genetic mutations of Wnt components, β-catenin accumulates in the cytoplasm and then translocates into the nucleus. Consequently, it binds to other proteins, such as LEF-1/TCF4, to promote the transcription of target genes, such as Jun, c-Myc and CyclinD-1 in a tissue specific manner, most of which encode oncoproteins. As a result, aberrant high expression of 3-catenin leads to various diseases including cancer.

[0007] In addition, a high-level cytoplasm expression and nuclear localization of β-catenin also induces tumorigenic traits and promotes cancer cell proliferation and survival (Valkenburg K C, et al. Cancers (Basel) 2011; 3:2050-2079). Moreover, β-catenin promotes the progression of tumors via suppressing the T-cell responses (Hong Y, et al. Cancer Res. 2015; 75:656-665).

[0008] Current treatments for cancer include surgery, radiation and chemotherapy. However, these methods are not fully effective and may result in serous side effects. Accordingly, there is a need in the art for alternative treatments for subjects having a CTNNB1-associated disorder, such as cancer, e.g., hepatocellular carcinoma.

### SUMMARY OF THE INVENTION

[0009] The present invention provides iRNA compositions which effect the RNA-induced silencing complex (RISC)-mediated cleavage of RNA transcripts of a gene encoding beta-catenin (CTNNB1). The CTNNB1 gene may be within a cell, e.g., a cell within a subject, such as a human subject. The present invention also provides methods of using the iRNA compositions of the invention for inhibiting the expression of a CTNNB1 gene and/or for treating a subject who would benefit from inhibiting or reducing the expression of a CTNNB1 gene, e.g., a subject suffering or prone to suffering from a CTNNB1-associated disorder, e.g., cancer, e.g., hepatocellular carcinoma.

[0010] Accordingly, in an aspect, the invention provides a double stranded ribonucleic acid (dsRNA) agent for inhibiting expression of beta-catenin (CTNNB1) in a cell, wherein the dsRNA agent comprises a sense strand and an antisense strand forming a double stranded region, wherein the sense strand comprises at least 15, e.g., 15, 16, 17, 18, 19, or 20, contiguous nucleotides differing by no more than 0, 1, 2, or 3 nucleotides from the nucleotide sequence of SEQ ID NO:1 and the antisense strand comprises at least 15, e.g., 15, 16, 17, 18, 19, 20, 21, 22, or 23 contiguous nucleotides differing by no more than 1, 2, or 3 nucleotides from the corresponding portion of the nucleotide sequence of SEQ ID NO:2.

[0011] In another aspect, the present invention provides a double stranded ribonucleic acid (dsRNA) for inhibiting expression of beta-catenin (CTNNB1) in a cell, wherein said dsRNA comprises a sense strand and an antisense strand forming a double stranded region, wherein the antisense strand comprises a region of complementarity to an mRNA encoding CTNNB1, and wherein the region of complementarity comprises at least 15, e.g., 15, 16, 17, 18, 19, 20, 21, 22, or 23 contiguous nucleotides differing by no more than 0, 1, 2, or 3 nucleotides from any one of the antisense nucleotide sequences in any one of Tables 2, 3, 5, or 6.

[0012] In one embodiment, the dsRNA agent comprises a sense strand comprising at least 15, e.g., 15, 16, 17, 18, 19, 20, or 21, contiguous nucleotides differing by no more than nucleotides from any one of the nucleotide sequences of the sense strands in any one of Tables 2, 3, 5, or 6 and an antisense strand comprising at least 15, e.g., 15, 16, 17, 18, 19, 20, 21, or 23 contiguous nucleotides differing by no more than two nucleotides from any one of the nucleotide sequences of the antisense strands in any one of Tables 2, 3, 5, or 6.

[0013] In one embodiment, the dsRNA agent comprises a sense strand comprising at least 15, e.g., 15, 16, 17, 18, 19, 20, or 21, contiguous nucleotides differing by no more than one nucleotide from any one of the nucleotide sequences of the sense strands in any one of Tables 2, 3, 5, or 6 and an antisense strand comprising at least 15, e.g., 15, 16, 17, 18, 19, 20, 21, 22, or 23 contiguous nucleotides differing by no more than one nucleotide from any one of the nucleotide sequences of the antisense strands in any one of Tables 2, 3, 5, or 6.

[0014] In one embodiment, the dsRNA agent comprises a sense strand comprising or consisting of a nucleotide sequence selected from the group consisting of any one of the nucleotide sequences of the sense strands in any one of Tables 2, 3, 5, and 6 and an antisense strand comprising or consisting of a nucleotide sequence selected from the group consisting of any one of the nucleotide sequences of the antisense strands in any one of Tables 2, 3, 5, and 6.

[0015] In one embodiment, the dsRNA agent comprises a sense strand comprising a contiguous nucleotide sequence which has at least 85%, e.g., 85%, 90%, 91%, 92%, 93%, 94%, 95%, 96%, 97%, 98%, 99%, or 100%, nucleotide sequence identity over its entire length to any one of the nucleotide sequences of the sense strands in any one of Tables 2, 3, 5, or 6 and an antisense strand comprising a contiguous nucleotide sequence which has at least 85%, e.g., 85%, 90%, 91%, 92%, 93%, 94%, 95%, 96%, 97%, 98%, 99%, or 100%, nucleotide sequence identity over its entire length to any one of the nucleotide sequences of the antisense strands in any one of Tables 2, 3, 5, or 6.

[0016] In one aspect, the present inventionprovides a double stranded ribonucleic acid (dsRNA) agent for inhibiting expression of beta-catenin (CTNNB1) in a cell, wherein the dsRNA agent comprises a sense strand and an antisense strand forming a double stranded region, wherein the sense strand comprises at least 15, e.g., 15, 16, 17, 18, 19, 20, or 21, contiguous nucleotides differing by no more than three, e.g., 3, 2, 1, or 0, nucleotides from any one of the nucleotide sequence of nucleotides 603-625, 1489-1511, or 1739-1761 of SEQ ID NO: 1, and the antisense strand comprises at least 15, e.g., 15, 16, 17, 18, 19, 20, 21, 22, or 23, contiguous nucleotides differing by no more than three, e.g., 3, 2, 1, or 0, nucleotides, from the corresponding nucleotide sequence of SEQ ID NO:2.

[0017] In one embodiment, the antisense strand comprises at least 15 contiguous nucleotides differing by no more than three nucleotides from any one of the antisense strand nucleotide sequences of a duplex selected from the group consisting of AD-1548393, AD-1548488, and AD-1548459.

[0018] In one embodiment, the dsRNA agent comprises at least one modified nucleotide.

[0019] In one embodiment, substantially all of the nucleotides of the sense strand are modified nucleotides; substantially all of the nucleotides of the antisense strand are modified nucleotides; or substantially all of the nucleotides of the sense strand and substantially all of the nucleotides of the antisense strand are modified nucleotides.

[0020] In one embodiment, all of the nucleotides of the sense strand are modified nucleotides; all of the nucleotides of the antisense strand are modified nucleotides; or all of the nucleotides of the sense strand and all of the nucleotides of the antisense strand are modified nucleotides.

[0021] In one embodiment, at least one of the modified nucleotides is selected from the group consisting of a deoxy-nucleotide, a 3′-terminal deoxythimidine (dT) nucleotide, a 2′-O-methyl modified nucleotide, a 2′-fluoro modified nucleotide, a 2′-deoxy-modified nucleotide, a locked nucleotide, an unlocked nucleotide, a conformationally restricted nucleotide, a constrained ethyl nucleotide, an abasic nucleotide, a 2′-amino-modified nucleotide, a 2′-O-allyl-modified nucleotide, 2′-C-alkyl-modified nucleotide, 2′-hydroxyl-modified nucleotide, a 2′-methoxyethyl modified nucleotide, a 2′-O-alkyl-modified nucleotide, a morpholino nucleotide, a phosphoramidate, a non-natural base comprising nucleotide, a tetrahydropyran modified nucleotide, a 1,5-anhydrohexitol modified nucleotide, a cyclohexenyl modified nucleotide, a nucleotide comprising a phosphorothioate group, a nucleotide comprising a methylphosphonate group, a nucleotide comprising a 5′-phosphate, a nucleotide comprising a 5′-phosphate mimic, a thermally destabilizing nucleotide, a glycol modified nucleotide (GNA), a nucleotide comprising a 2′ phosphate, and a 2-O—(N-methylacetamide) modified nucleotide; and combinations thereof.

[0022] In one embodiment, at least one of the modified nucleotides is selected from the group consisting of LNA, HNA, CeNA, 2′-methoxyethyl, 2′-O-alkyl, 2′-O-allyl, 2′-C-allyl, 2′-fluoro, 2′-deoxy, 2′-hydroxyl, and glycol; and combinations thereof.

[0023] In one embodiment, at least one of the modified nucleotides is selected from the group consisting of a deoxy-nucleotide, a 2′-O-methyl modified nucleotide, a 2′-fluoro modified nucleotide, a 2′-deoxy-modified nucleotide, a glycol modified nucleotide (GNA), e.g., Ggn, Cgn, Tgn, or Agn, a nucleotide with a 2′ phosphate, e.g., G2p, C2p, A2p or U2p, a nucleotide comprising a phosphorothioate group, and a vinyl-phosphonate nucleotide; and combinations thereof.

[0024] In another embodiment, at least one of the modified nucleotides is a nucleotide with a thermally destabilizing nucleotide modification.

[0025] In one embodiment, the thermally destabilizing nucleotide modification is selected from the group consisting of an abasic modification; a mismatch with the opposing nucleotide in the duplex; a destabilizing sugar modification, a 2′-deoxy modification, an acyclic nucleotide, an unlocked nucleic acid (UNA), and a glycerol nucleic acid (GNA).

[0026] In some embodiments, the modified nucleotide comprises a short sequence of 3′-terminal deoxythimidine nucleotides (dT).

[0027] In some embodiments, the dsRNA agent further comprises at least one phosphorothioate internucleotide linkage. In some embodiments, the dsRNA agent comprises 6-8 phosphorothioate internucleotide linkages. In one embodiment, the phosphorothioate or methylphosphonate internucleotide linkage is at the 3′-terminus of one strand. Optionally, the strand is the antisense strand. In another embodiment, the strand is the sense strand. In a related embodiment, the phosphorothioate or methylphosphonate internucleotide linkage is at the 5′-terminus of one strand. Optionally, the strand is the antisense strand. In another embodiment, the strand is the sense strand. In another embodiment, the phosphorothioate or methylphosphonate internucleotide linkage is at the both the 5′- and 3′-terminus of one strand. Optionally, the strand is the antisense strand. In another embodiment, the strand is the sense strand.

[0028] The double stranded region may be 19-30 nucleotide pairs in length; 19-25 nucleotide pairs in length; 19-23 nucleotide pairs in length; 23-27 nucleotide pairs in length; or 21-23 nucleotide pairs in length.

[0029] In one embodiment, each strand is independently no more than 30 nucleotides in length.

[0030] In one embodiment, the sense strand is 21 nucleotides in length and the antisense strand is 23 nucleotides in length.

[0031] The region of complementarity may be at least 17 nucleotides in length; between 19 and 23 nucleotides in length; or 19 nucleotides in length.

[0032] In one embodiment, at least one strand comprises a 3′ overhang of at least 1 nucleotide. In another embodiment, at least one strand comprises a 3′ overhang of at least 2 nucleotides.

[0033] In one embodiment, the dsRNA agent further comprises a ligand.

[0034] In one embodiment, the ligand is conjugated to the 3′ end of the sense strand of the dsRNA agent.

[0035] In one embodiment, the ligand is an N-acetylgalactosamine (GalNAc) derivative.

[0036] In one embodiment, the ligand is one or more GalNAc derivatives attached through a monovalent, bivalent, or trivalent branched linker.

[0037] In one embodiment, the ligand is

[chemical structure]

[0038] In one embodiment, the dsRNA agent is conjugated to the ligand as shown in the following schematic

[chemical structure]

and, wherein X is O or S.

[0039] In one embodiment, the X is O.

[0040] In one embodiment, the dsRNA agent further comprises at least one phosphorothioate or methylphosphonate internucleotide linkage.

[0041] In one embodiment, the phosphorothioate or methylphosphonate internucleotide linkage is at the 3′-terminus of one strand, e.g., the antisense strand or the sense strand.

[0042] In another embodiment, the phosphorothioate or methylphosphonate internucleotide linkage is at the 5′-terminus of one strand, e.g., the antisense strand or the sense strand.

[0043] In one embodiment, the phosphorothioate or methylphosphonate internucleotide linkage is at the both the 5′- and 3′-terminus of one strand. In one embodiment, the strand is the antisense strand.

[0044] In one embodiment, the base pair at the 1 position of the 5′-end of the antisense strand of the duplex is an AU base pair.

[0045] In one embodiment, the antisense strand comprises at least 15, e.g., 15, 16, 17, 18, 19, 20, 21, 22, or 23, contiguous nucleotides differing by no more than 3, e.g., 3, 2, 1, or 0, nucleotides from the nucleotide sequence 5′-UTUCGAAUCAATCCAACAGUAGC-3′ (SEQ ID NO: 18).

[0046] In one embodiment, the sense strand comprises at least 15, e.g., 15, 16, 17, 18, 19, 20, or 21, contiguous nucleotides differing by no more than 3, e.g., 3, 2, 1, or 0, nucleotides from the nucleotide sequence 5′-UACUGUUGGAUUGAUUCGAAA-3′ (SEQ ID NO: 19) and the antisense strand comprises at least 15, e.g., 15, 16, 17, 18, 19, 20, 21, 22, or 23, contiguous nucleotides differing by no more than 3, e.g., 3, 2, 1, or 0, nucleotides from the nucleotide sequence 5′-UTUCGAAUCAATCCAACAGUAGC-3′ (SEQ ID NO: 18).

[0047] In one embodiment, the antisense strand comprises the nucleotide sequence 5′-UTUCGAAUCAATCCAACAGUAGC-3′ (SEQ ID NO: 18).

[0048] In one embodiment, the sense strand comprises the nucleotide sequence 5′-UACUGUUGGAUUGAUUCGAAA-3′ (SEQ ID NO: 19) and the antisense strand comprises the nucleotide sequence 5′-UTUCGAAUCAATCCAACAGUAGC-3′ (SEQ ID NO: 18).

[0049] In one embodiment, the sense strand differs by no more than 4, e.g., 4, 3, 2, 1, or 0, bases from the nucleotide sequence 5′-usascuguugGfAfUfugauucgasasa-3′ (SEQ ID NO: 20) and the antisense strand differs by no more than 4, e.g., 4, 3, 2, 1, or 0, bases from the nucleotide sequence 5′-VPudTucdGadAucaadTcCfaacaguasgsc-3′ (SEQ ID NO: 21), wherein a, g, c and u are 2′-O-methyl (2′-OMe) A, G, C, and U respectively; Af, Gf, Cf and Uf are 2′-fluoro A, G, C and U respectively; s is a phosphorothioate linkage; VP is a vinyl phosphonate; dT is 2′-deoxythimidine-3′-phosphate; dG is 2′-deoxyguanosine-3′-phosphate; and dA is 2′-deoxyadenosine-3′-phosphate.

[0050] In one aspect, the present invention provides a double stranded RNA (dsRNA) agent for inhibiting expression of beta-catenin (CTNNB1) in a cell, comprising a sense strand comprising the nucleotide sequence 5′-usascuguugGfAfUfugauucgasasa-3′ (SEQ ID NO: 20) and an antisense strand comprising the nucleotide sequence 5′-VPudTucdGadAucaadTcCfaacaguasgsc-3′ (SEQ ID NO: 21), wherein a, g, c and u are 2′-O-methyl (2′-OMe) A, G, C, and U respectively; Af, Gf, Cf and Uf are 2′-fluoro A, G, C and U respectively; s is a phosphorothioate linkage; VP is a vinyl phosphonate; dT is 2′-deoxythimidine-3′-phosphate; dG is 2′-deoxyguanosine-3′-phosphate; and dA is 2′-deoxyadenosine-3′-phosphate.

[0051] In one embodiment, the dsRNA agent further comprises a ligand.

[0052] The present invention also provides cells containing any of the dsRNA agents of the invention and pharmaceutical compositions comprising any of the dsRNA agents of the invention.

[0053] The pharmaceutical composition of the invention may include dsRNA agent in an unbuffered solution, e.g., saline or water, or the pharmaceutical composition of the invention may include the dsRNA agent is in a buffer solution, e.g., a buffer solution comprising acetate, citrate, prolamine, carbonate, or phosphate or any combination thereof; or phosphate buffered saline (PBS).

[0054] In one aspect, the present invention provides a pharmaceutical composition for inhibiting expression of a gene encoding beta-catenin (CTNNB1) comprising the dsRNA agent of any one of claims 1-47 and a lipid.

[0055] In one embodiment, the lipid is a cationic lipid.

[0056] In one embodiment, the cationic lipid comprises one or more biodegradable groups.

[0057] In one embodiment, the lipid comprises the structure

[chemical structure]

[0058] In one embodiment, the pharmaceutical composition comprises
[0059] (a)

[chemical structure]

[0060] (b) cholesterol;
[0061] (c) DSPC; and
[0062] (d) PEG-DMG.

[0063] In one embodiment, the

[chemical structure]

DSPC, cholesterol, and PEG-DMG are present in a molar ratio of 50:12:36:2, respectively.

[0064] In one aspect, the present invention provides a pharmaceutical composition for inhibiting expression of a gene encoding beta-catenin (CTNNB1) comprising, a dsRNA agent for inhibiting expression of a gene encoding beta-catenin (CTNNB1), comprising a sense strand and an antisense strand forming a double stranded region, wherein the antisense strand comprises at least 15, e.g., 15, 16, 17, 18, 19, 20, 21, 22, or 23, contiguous nucleotides differing by no more than 3, e.g., 3, 2, 1, or 0, nucleotides from the nucleotide sequence 5′-UTUCGAAUCAATCCAACAGUAGC-3′ (SEQ ID NO: 18), and a lipid.

[0065] In one embodiment, the sense strand comprises at least 15, e.g., 15, 16, 17, 18, 19, 20, or 21, contiguous nucleotides differing by no more than 3, e.g., 3, 2, 1, or 0, nucleotides from the nucleotide sequence 5′-UACUGUUGGAUUGAUUCGAAA-3′ (SEQ ID NO: 19) and the antisense strand comprises at least 15, e.g., 15, 16, 17, 18, 19, 20, 21, 22, or 23, contiguous nucleotides differing by no more than 3, e.g., 3, 2, 1, or 0, nucleotides from the nucleotide sequence 5′-UTUCGAAUCAATCCAACAGUAGC-3′ (SEQ ID NO: 18).

[0066] In one embodiment, the antisense strand comprises the nucleotide sequence 5′-UTUCGAAUCAATCCAACAGUAGC-3′ (SEQ ID NO: 18).

[0067] In one embodiment, the sense strand comprises the nucleotide sequence 5′-UACUGUUGGAUUGAUUCGAAA-3′ (SEQ ID NO: 19) and the antisense strand comprises the nucleotide sequence 5′-UTUCGAAUCAATCCAACAGUAGC-3′ (SEQ ID NO: 18).

[0068] In one embodiment, the sense strand differs by no more than 4, e.g., 4, 3, 2, 1, or 1, bases from the nucleotide sequence 5′-usascuguugGfAfUfugauucgasasa-3′ (SEQ ID NO: 20) and the antisense strand differs by no more than 4, e.g., 4, 3, 2, 1, or 0, bases from the nucleotide sequence 5′-VPudTucdGadAucaadTcCfaacaguasgsc-3′ (SEQ ID NO: 21), wherein a, g, c and u are 2′-O-methyl (2′-OMe) A, G, C, and U respectively; Af, Gf, Cf and Uf are 2′-fluoro A, G, C and U respectively; s is a phosphorothioate linkage; VP is a vinyl phosphonate; dT is 2′-deoxythimidine-3′-phosphate; dG is 2′-deoxyguanosine-3′-phosphate; and dA is 2′-deoxyadenosine-3′-phosphate.

[0069] In one embodiment, the lipid comprises the structure

[chemical structure]

[0070] In one embodiment, the pharmaceutical composition comprises
[0071] (a)

[chemical structure]

[0072] (b) cholesterol;
[0073] (c) DSPC; and
[0074] (d) PEG-DMG.

[0075] In one embodiment, the

[chemical structure]

DSPC, cholesterol, and PEG-DMG are present in a molar ratio of 50:12:36:2, respectively.

[0076] In one aspect, the present invention provides a method of inhibiting expression of a beta-catenin (CTNNB1) gene in a cell. The method includes contacting the cell with any of the dsRNAs of the invention or any of the pharmaceutical compositions of the invention, thereby inhibiting expression of the CTNNB1 gene in the cell.

[0077] In one embodiment, the cell is within a subject, e.g., a human subject, e.g., a subject having a beta-catenin (CTNNB1)-associated disorder, such as cancer, e.g., hepatocellular carcinoma.

[0078] In certain embodiments, the CTNNB1 expression is inhibited by at least about 30%, 40%, 50%, 60%, 70%, 80%, 90%, or 95%. In one embodiment, inhibiting expression of CTNNB1 decreases CTNNB1 protein level in serum of the subject by at least 30%, 40%, 50%, 60%, 70%, 80%, 90%, or 95%.

[0079] In one aspect, the present invention provides a method of treating a subject having a disorder that would benefit from reduction in beta-catenin (CTNNB1) expression. The method includes administering to the subject a therapeutically effective amount of any of the dsRNAs of the invention or any of the pharmaceutical compositions of the invention, thereby treating the subject having the disorder that would benefit from reduction in CTNNB1 expression.

[0080] In another aspect, the present invention provides a method of preventing at least one symptom in a subject having a disorder that would benefit from reduction in beta-catenin (CTNNB1) expression. The method includes administering to the subject a prophylactically effective amount of any of the dsRNAs of the invention or any of the pharmaceutical compositions of the invention, thereby preventing at least one symptom in the subject having the disorder that would benefit from reduction in CTNNB1 expression.

[0081] In certain embodiments, the disorder is a beta-catenin (CTNNB1)-associated disorder, e.g. a cancer.

[0082] In some embodiments, the CTNNB1-associated disorder is hepatocellular carcinoma.

[0083] In certain embodiments, administration of the dsRNA to the subject causes a decrease CTNNB1 protein accumulation in the subject.

[0084] In a further aspect, the present invention also provides methods of inhibiting the expression of CTNNB1 in a subject. The methods include administering to the subject a therapeutically effective amount of any of the dsRNAs provided herein, thereby inhibiting the expression of CTNNB1 in the subject.

[0085] In one embodiment, the subject is human.

[0086] In one embodiment, the dsRNA agent is administered to the subject at a dose of about 0.01 mg/kg to about 50 mg/kg.

[0087] In one embodiment, the dsRNA agent is administered to the subject subcutaneously.

[0088] In one embodiment, the dsRNA agent is administered to the subject intravenously.

[0089] In one embodiment, the methods of the invention include further determining the level of CTNNB1 in a sample(s) from the subject.

[0090] In one embodiment, the level of CTNNB1 in the subject sample(s) is a CTNNB1 protein level in a blood or serum or liver tissue sample(s).

[0091] In certain embodiments, the methods of the invention further comprise administering to the subject an additional therapeutic agent.

[0092] In certain embodiments, the additional therapeutic agent is selected from the group consisting of a chemotherapeutic agent, a growth inhibitory agent, an anti-angiogenesis agent, an anti-neoplastic composition and a combination of any of the foregoing.

[0093] The present invention also provides kits comprising any of the dsRNAs of the invention or any of the pharmaceutical compositions of the invention, and optionally, instructions for use. In one embodiment, the invention provides a kit for performing a method of inhibiting expression of CTNNB1 gene in a cell by contacting a cell with a double stranded RNAi agent of the invention in an amount effective to inhibit expression of the CTNNB1 in the cell. The kit comprises an RNAi agent and instructions for use and, optionally, means for administering the RNAi agent to a subject.

[0094] The present invention further provides an RNA-induced silencing complex (RISC) comprising an antisense strand of any of the dsRNA agents of the invention.

### BRIEF DESCRIPTION OF THE DRAWINGS

[0095] FIG. 1A is a graph depicting the effect of a single 0.1 mg/kg or 0.3 mg/kg intravenously administered dose of AD-1548393 at Days 5, 15, and 29 post-dose. The percent of CTNNB1 mRNA remaining relative to pre-dose levels of CTNNB1 mRNA are shown.

[0096] FIG. 1B is a graph depicting the effect of a single 0.1 mg/kg or 0.3 mg/kg intravenously administered dose of AD-1548459 at Days 5, 15, and 29 post-dose. The percent of CTNNB1 mRNA remaining relative to pre-dose levels of CTNNB1 mRNA are shown.

[0097] FIG. 1C is a graph depicting the effect of a single 0.1 mg/kg or 0.3 mg/kg intravenously administered dose of AD-1548488 at Days 5, 15, and 29 post-dose. The percent of CTNNB1 mRNA remaining relative to pre-dose levels of CTNNB1 mRNA are shown.

### DETAILED DESCRIPTION OF THE INVENTION

[0098] The present invention provides iRNA compositions which effect the RNA-induced silencing complex (RISC)-mediated cleavage of RNA transcripts of a beta-catenin (CTNNB1) gene. The gene may be within a cell, e.g., a cell within a subject, such as a human. The use of these iRNAs enables the targeted degradation of mRNAs of the corresponding gene (CTNNB1) in mammals.

[0099] The iRNAs of the invention have been designed to target the human beta-catenin (CTNNB1) gene, including portions of the gene that are conserved in the CTNNB1 orthologs of other mammalian species. Without intending to be limited by theory, it is believed that a combination or sub-combination of the foregoing properties and the specific target sites or the specific modifications in these iRNAs confer to the iRNAs of the invention improved efficacy, stability, potency, durability, and safety.

[0100] Accordingly, the present invention provides methods for treating and preventing a beta-catenin (CTNNB1)-associated disorder, e.g., cancer, e.g., hepatocellular carcinoma, using iRNA compositions which effect the RNA-induced silencing complex (RISC)-mediated cleavage of RNA transcripts of a CTNNB1 gene.

[0101] The iRNAs of the invention include an RNA strand (the antisense strand) having a region which is up to about 30 nucleotides or less in length, e.g., 19-30, 19-29, 19-28, 19-27, 19-26, 19-25, 19-24, 19-23, 19-22, 19-21, 19-20, 20-30, 20-29, 20-28, 20-27, 20-26, 20-25, 20-24, 20-23, 20-22, 20-21, 21-30, 21-29, 21-28, 21-27, 21-26, 21-25, 21-24, 21-23, or 21-22 nucleotides in length, which region is substantially complementary to at least part of an mRNA transcript of a CTNNB1 gene.

[0102] In certain embodiments, one or both of the strands of the double stranded RNAi agents of the invention is up to 66 nucleotides in length, e.g., 36-66, 26-36, 25-36, 31-60, 22-43, 27-53 nucleotides in length, with a region of at least 19 contiguous nucleotides that is substantially complementary to at least a part of an mRNA transcript of a CTNNB1 gene. In some embodiments, such iRNA agents having longer length antisense strands may, for example, include a second RNA strand (the sense strand) of 20-60 nucleotides in length wherein the sense and antisense strands form a duplex of 18-30 contiguous nucleotides.

[0103] The use of iRNAs of the invention enables the targeted degradation of mRNAs of the corresponding gene (CTNNB1 gene) in mammals. Using in vitro assays, the present inventors have demonstrated that iRNAs targeting a CTNNB1 gene can potently mediate RNAi, resulting in significant inhibition of expression of a CTNNB1 gene. Thus, methods and compositions including these iRNAs are useful for treating a subject having a CTNNB1-associated disorder, e.g., cancer, e.g., hepatocellular carcinoma.

[0104] Accordingly, the present invention provides methods and combination therapies for treating a subject having a disorder that would benefit from inhibiting or reducing the expression of a CTNNB1 gene, e.g., a beta-catenin (CTNNB1)-associated disease, such as cancer, e.g., hepatocellular carcinoma, using iRNA compositions which effect the RNA-induced silencing complex (RISC)-mediated cleavage of RNA transcripts of a CTNNB1 gene.

[0105] The present invention also provides methods for preventing at least one symptom in a subject having a disorder that would benefit from inhibiting or reducing the expression of a CTNNB1 gene, e.g., cancer, e.g., hepatocellular carcinoma.

[0106] The following detailed description discloses how to make and use compositions containing iRNAs to inhibit the expression of a CTNNB1 gene as well as compositions, uses, and methods for treating subjects that would benefit from inhibition and/or reduction of the expression of a CTNNB1 gene, e.g., subjects susceptible to or diagnosed with a CTNNB1-associated disorder.

### I. Definitions

[0107] In order that the present invention may be more readily understood, certain terms are first defined. In addition, it should be noted that whenever a value or range of values of a parameter are recited, it is intended that values and ranges intermediate to the recited values are also intended to be part of this invention.

[0108] The articles “a” and “an” are used herein to refer to one or to more than one (i.e., to at least one) of the grammatical object of the article. By way of example, “an element” means one element or more than one element, e.g., a plurality of elements.

[0109] The term “including” is used herein to mean, and is used interchangeably with, the phrase “including but not limited to”.

[0110] The term “or” is used herein to mean, and is used interchangeably with, the term “and/or,” unless context clearly indicates otherwise. For example, “sense strand or antisense strand” is understood as “sense strand or antisense strand or sense strand and antisense strand.”

[0111] The term “about” is used herein to mean within the typical ranges of tolerances in the art. For example, “about” can be understood as about 2 standard deviations from the mean. In certain embodiments, about means±10%. In certain embodiments, about means±5%. When about is present before a series of numbers or a range, it is understood that “about” can modify each of the numbers in the series or range.

[0112] The term “at least”, “no less than”, or “or more” prior to a number or series of numbers is understood to include the number adjacent to the term “at least”, and all subsequent numbers or integers that could logically be included, as clear from context. For example, the number of nucleotides in a nucleic acid molecule must be an integer. For example, “at least 19 nucleotides of a 21 nucleotide nucleic acid molecule” means that 19, 20, or 21 nucleotides have the indicated property.

[0113] When at least is present before a series of numbers or a range, it is understood that “at least” can modify each of the numbers in the series or range.

[0114] As used herein, “no more than” or “or less” is understood as the value adjacent to the phrase and logical lower values or integers, as logical from context, to zero. For example, a duplex with an overhang of “no more than 2 nucleotides” has a 2, 1, or 0 nucleotide overhang. When “no more than” is present before a series of numbers or a range, it is understood that “no more than” can modify each of the numbers in the series or range. As used herein, ranges include both the upper and lower limit.

[0115] As used herein, methods of detection can include determination that the amount of analyte present is below the level of detection of the method.

[0116] In the event of a conflict between an indicated target site and the nucleotide sequence for a sense or antisense strand, the indicated sequence takes precedence.

[0117] In the event of a conflict between a sequence and its indicated site on a transcript or other sequence, the nucleotide sequence recited in the specification takes precedence.

[0118] As used herein, “beta-catenin,” used interchangeably with the term “CTNNB1,” refers to a structure protein in the cadherin mediated cell-cell adhesive system, and is also known as a pivotal transcriptional activator of the Wnt signaling pathway. The Wnt/β-catenin signaling pathway, also called the canonical Wnt signaling pathway, is a conserved signaling axis participating in diverse physiological processes such as proliferation, differentiation, apoptosis, migration, invasion and tissue homeostasis (Choi B, et al., Cell Rep. 2020; 31(5):107540). Dysregulation of the Wnt/β-catenin cascade contributes to the development and progression of some solid tumors and hematological malignancies, such as hematocellular carcinoma (HCC) (Ge X, et al. Journal of hematology & oncology. 2010; 3:33; He S, et al., Biomed Pharmacother. 2020; 132:110851; Gajos-Michniewicz A, et al., Int J Mol Sci 2020, 21(14); Suzuki T, et al., J Gastroenterol Hepatol. 2002; 17:994-1000). Indeed, beta-catenin plays important roles in promoting tumor progression by stimulating tumor cell proliferation and reducing the activity of cell adhesion systems and is associated with a poor prognosis, especially in patients with poorly differentiated HCCs (Inagawa S, et al., Clin Cancer Res. 2002; 8:450-456). CTNNB1 is also known as catenin beta, Armadillo, NEDSDV; MRD19; or EVR7.

[0119] The sequence of a human CTNNB1 mRNA transcript can be found at, for example, GenBank Accession No. GI: 1519314571 (NM_001904.4; SEQ ID NO: 1; reverse complement, SEQ ID NO: 2).

[0120] The sequence of mouse CTNNB1 mRNA can be found at, for example, GenBank Accession No. GI: 260166638 (NM_007614.3; SEQ ID NO:3; reverse complement, SEQ ID NO:4). The sequence of rat CTNNB1 mRNA can be found at, for example, GenBank Accession No. GI: 46048608 (NM_053357.2; SEQ ID NO:5; reverse complement, SEQ ID NO: 6). The sequence of Macaca fascicularis CTNNB1 mRNA can be found at, for example, GenBank Accession No. GI: 985482040 (NM_001319394.1; SEQ ID NO:7; reverse complement, SEQ ID NO: 8). The sequence of Macaca mulatta CTNNB1 mRNA can be found at, for example, GenBank Accession No. GI: 383872646 (NM_001257918.1; SEQ ID NO:9; reverse complement, SEQ ID NO: 10).

[0121] Additional examples of CTNNB1 mRNA sequences are readily available through publicly available databases, e.g., GenBank, UniProt, OMIM, and the Macaca genome project web site.

[0122] Further information on CTNNB1 can be found, for example, at www.ncbi.nlm.nih.gov/gene/?term=CTNNB1.

[0123] The entire contents of each of the foregoing GenBank Accession numbers and the Gene database numbers are incorporated herein by reference as of the date of filing this application.

[0124] The term CTNNB1, as used herein, also refers to variations of the CTNNB1 gene including variants provided in the SNP database. Numerous seuqnce variations within the CTNNB1 gene have been identified and may be found at, for example, NCBI dbSNP and UniProt (see, e.g., www.ncbi.nlm.nih.gov/snp/?term=CTNNB1, the entire contents of which is incorporated herein by reference as of the date of filing this application.

[0125] As used herein, “target sequence” refers to a contiguous portion of the nucleotide sequence of an mRNA molecule formed during the transcription of a CTNNB1 gene, including mRNA that is a product of RNA processing of a primary transcription product. In one embodiment, the target portion of the sequence will be at least long enough to serve as a substrate for iRNA-directed cleavage at or near that portion of the nucleotide sequence of an mRNA molecule formed during the transcription of a CTNNB1gene.

[0126] The target sequence may be from about 19-36 nucleotides in length, e.g., about 19-30 nucleotides in length. For example, the target sequence can be about 19-30 nucleotides, 19-30, 19-29, 19-28, 19-27, 19-26, 19-25, 19-24, 19-23, 19-22, 19-21, 19-20, 20-30, 20-29, 20-28, 20-27, 20-26, 20-25, 20-24, 20-23, 20-22, 20-21, 21-30, 21-29, 21-28, 21-27, 21-26, 21-25, 21-24, 21-23, or 21-22 nucleotides in length. In certain embodiments, the target sequence is 19-23 nucleotides in length, optionally 21-23 nucleotides in length. Ranges and lengths intermediate to the above recited ranges and lengths are also contemplated to be part of the disclosure.

[0127] As used herein, the term “strand comprising a sequence” refers to an oligonucleotide comprising a chain of nucleotides that is described by the sequence referred to using the standard nucleotide nomenclature.

[0128] “G,” “C,” “A,” “T,” and “U” each generally stand for a nucleotide that contains guanine, cytosine, adenine, thymidine, and uracil as a base, respectively. However, it will be understood that the term “ribonucleotide” or “nucleotide” can also refer to a modified nucleotide, as further detailed below, or a surrogate replacement moiety (see, e.g., Table 1). The skilled person is well aware that guanine, cytosine, adenine, and uracil can be replaced by other moieties without substantially altering the base pairing properties of an oligonucleotide comprising a nucleotide bearing such replacement moiety. For example, without limitation, a nucleotide comprising inosine as its base can base pair with nucleotides containing adenine, cytosine, or uracil. Hence, nucleotides containing uracil, guanine, or adenine can be replaced in the nucleotide sequences of dsRNA featured in the invention by a nucleotide containing, for example, inosine. In another example, adenine and cytosine anywhere in the oligonucleotide can be replaced with guanine and uracil, respectively to form G-U Wobble base pairing with the target mRNA. Sequences containing such replacement moieties are suitable for the compositions and methods featured in the invention.

[0129] The terms “iRNA”, “RNAi agent,” “iRNA agent,”, “RNA interference agent” as used interchangeably herein, refer to an agent that contains RNA as that term is defined herein, and which mediates the targeted cleavage of an RNA transcript via an RNA-induced silencing complex (RISC) pathway. iRNA directs the sequence-specific degradation of mRNA through a process known as RNA interference (RNAi). The iRNA modulates, e.g., inhibits, the expression of a CTNNB1 gene in a cell, e.g., a liver cell within a subject, such as a mammalian subject.

[0130] In one embodiment, an RNAi agent of the invention includes a single stranded RNA that interacts with a target RNA sequence, e.g., a CTNNB1 target mRNA sequence, to direct the cleavage of the target RNA. Without wishing to be bound by theory it is believed that long double stranded RNA introduced into cells is broken down into siRNA by a Type III endonuclease known as Dicer (Sharp et al. (2001) Genes Dev. 15:485). Dicer, a ribonuclease-III-like enzyme, processes the dsRNA into 19-23 base pair short interfering RNAs with characteristic two base 3′ overhangs (Bernstein, et al., (2001) Nature 409:363). The siRNAs are then incorporated into an RNA-induced silencing complex (RISC) where one or more helicases unwind the siRNA duplex, enabling the complementary antisense strand to guide target recognition (Nykanen, et al., (2001) Cell 107:309). Upon binding to the appropriate target mRNA, one or more endonucleases within the RISC cleave the target to induce silencing (Elbashir, et al., (2001) Genes Dev. 15:188). Thus, in one aspect the invention relates to a single stranded RNA (siRNA) generated within a cell and which promotes the formation of a RISC complex to effect silencing of the target gene, i.e., a CTNNB1 gene. Accordingly, the term “siRNA” is also used herein to refer to an iRNA as described above.

[0131] In certain embodiments, the RNAi agent may be a single-stranded siRNA (ssRNAi) that is introduced into a cell or organism to inhibit a target mRNA. Single-stranded RNAi agents bind to the RISC endonuclease, Argonaute 2, which then cleaves the target mRNA. The single-stranded siRNAs are generally 15-30 nucleotides and are chemically modified. The design and testing of single-stranded siRNAs are described in U.S. Pat. No. 8,101,348 and in Lima et al., (2012) Cell 150:883-894, the entire contents of each of which are hereby incorporated herein by reference. Any of the antisense nucleotide sequences described herein may be used as a single-stranded siRNA as described herein or as chemically modified by the methods described in Lima et al., (2012) Cell 150:883-894.

[0132] In certain embodiments, an “iRNA” for use in the compositions, uses, and methods of the invention is a double stranded RNA and is referred to herein as a “double stranded RNA agent,” “double stranded RNA (dsRNA) molecule,” “dsRNA agent,” or “dsRNA”. The term “dsRNA”, refers to a complex of ribonucleic acid molecules, having a duplex structure comprising two anti-parallel and substantially complementary nucleic acid strands, referred to as having “sense” and “antisense” orientations with respect to a target RNA, i.e., a CTNNB1 gene. In some embodiments of the invention, a double stranded RNA (dsRNA) triggers the degradation of a target RNA, e.g., an mRNA, through a post-transcriptional gene-silencing mechanism referred to herein as RNA interference or RNAi.

[0133] In general, the majority of nucleotides of each strand of a dsRNA molecule are ribonucleotides, but as described in detail herein, each or both strands can also include one or more non-ribonucleotides, e.g., a deoxyribonucleotide or a modified nucleotide. In addition, as used in this specification, an “iRNA” may include ribonucleotides with chemical modifications; an iRNA may include substantial modifications at multiple nucleotides. As used herein, the term “modified nucleotide” refers to a nucleotide having, independently, a modified sugar moiety, a modified internucleotide linkage, or modified nucleobase, or any combination thereof. Thus, the term modified nucleotide encompasses substitutions, additions or removal of, e.g., a functional group or atom, to internucleoside linkages, sugar moieties, or nucleobases. The modifications suitable for use in the agents of the invention include all types of modifications disclosed herein or known in the art. Any such modifications, as used in a siRNA type molecule, are encompassed by “iRNA” or “RNAi agent” for the purposes of this specification and claims.

[0134] In certain embodiments of the instant disclosure, inclusion of a deoxy-nucleotide if present within an RNAi agent can be considered to constitute a modified nucleotide.

[0135] The duplex region may be of any length that permits specific degradation of a desired target RNA through a RISC pathway, and may range from about 19 to 36 base pairs in length, e.g., about 19-30 base pairs in length, for example, about 9, 10, 11, 12, 13, 14, 15, 16, 17, 18, 19, 20, 21, 22, 23, 24, 25, 26, 27, 28, 29, 30, 31, 32, 33, 34, 35, or 36 base pairs in length, such as about 19-30, 19-29, 19-28, 19-27, 19-26, 19-25, 19-24, 19-23, 19-22, 19-21, 19-20, 20-30, 20-29, 20-28, 20-27, 20-26, 20-25, 20-24, 20-23, 20-22, 20-21, 21-30, 21-29, 21-28, 21-27, 21-26, 21-25, 21-24, 21-23, or 21-22 base pairs in length. In certain embodiments, the duplex region is 19-21 base pairs in length, e.g., 21 base pairs in length. Ranges and lengths intermediate to the above recited ranges and lengths are also contemplated to be part of the disclosure.

[0136] The two strands forming the duplex structure may be different portions of one larger RNA molecule, or they may be separate RNA molecules. Where the two strands are part of one larger molecule, and therefore are connected by an uninterrupted chain of nucleotides between the 3′-end of one strand and the 5′-end of the respective other strand forming the duplex structure, the connecting RNA chain is referred to as a “hairpin loop.” A hairpin loop can comprise at least one unpaired nucleotide. In some embodiments, the hairpin loop can comprise at least 2, 3, 4, 5, 6, 7, 8, 9, 10, 20, 23 or more unpaired nucleotides. In some embodiments, the hairpin loop can be 10 or fewer nucleotides. In some embodiments, the hairpin loop can be 8 or fewer unpaired nucleotides. In some embodiments, the hairpin loop can be 4-10 unpaired nucleotides. In some embodiments, the hairpin loop can be 4-8 nucleotides.

[0137] Where the two substantially complementary strands of a dsRNA are comprised by separate RNA molecules, those molecules need not be, but can be covalently connected. Where the two strands are connected covalently by means other than an uninterrupted chain of nucleotides between the 3′-end of one strand and the 5′-end of the respective other strand forming the duplex structure, the connecting structure is referred to as a “linker.” The RNA strands may have the same or a different number of nucleotides. The maximum number of base pairs is the number of nucleotides in the shortest strand of the dsRNA minus any overhangs that are present in the duplex. In addition to the duplex structure, an RNAi may comprise one or more nucleotide overhangs. In one embodiment of the RNAi agent, at least one strand comprises a 3′ overhang of at least 1 nucleotide. In another embodiment, at least one strand comprises a 3′ overhang of at least 2 nucleotides, e.g., 2, 3, 4, 5, 6, 7, 9, 10, 11, 12, 13, 14, or 15 nucleotides. In other embodiments, at least one strand of the RNAi agent comprises a 5′ overhang of at least 1 nucleotide. In certain embodiments, at least one strand comprises a 5′ overhang of at least 2 nucleotides, e.g., 2, 3, 4, 5, 6, 7, 9, 10, 11, 12, 13, 14, or 15 nucleotides. In still other embodiments, both the 3′ and the 5′ end of one strand of the RNAi agent comprise an overhang of at least 1 nucleotide.

[0138] In certain embodiments, an iRNA agent of the invention is a dsRNA, each strand of which comprises 19-23 nucleotides, that interacts with a target RNA sequence, e.g., a CTNNB1 gene, to direct cleavage of the target RNA.

[0139] In some embodiments, an iRNA of the invention is a dsRNA of 24-30 nucleotides that interacts with a target RNA sequence, e.g., a CTNNB1 target mRNA sequence, to direct the cleavage of the target RNA.

[0140] As used herein, the term “nucleotide overhang” refers to at least one unpaired nucleotide that protrudes from the duplex structure of a double stranded iRNA. For example, when a 3′-end of one strand of a dsRNA extends beyond the 5′-end of the other strand, or vice versa, there is a nucleotide overhang. A dsRNA can comprise an overhang of at least one nucleotide; alternatively the overhang can comprise at least two nucleotides, at least three nucleotides, at least four nucleotides, at least five nucleotides or more. A nucleotide overhang can comprise or consist of a nucleotide/nucleoside analog, including a deoxynucleotide/nucleoside. The overhang(s) can be on the sense strand, the antisense strand, or any combination thereof. Furthermore, the nucleotide(s) of an overhang can be present on the 5′-end, 3′-end, or both ends of either an antisense or sense strand of a dsRNA.

[0141] In one embodiment, the antisense strand of a dsRNA has a 1-10 nucleotide, e.g., a 1, 2, 3, 4, 5, 6, 7, 8, 9, or 10 nucleotide, overhang at the 3′-end or the 5′-end. In one embodiment, the sense strand of a dsRNA has a 1-10 nucleotide, e.g., a 1, 2, 3, 4, 5, 6, 7, 8, 9, or 10 nucleotide, overhang at the 3′-end or the 5′-end. In another embodiment, one or more of the nucleotides in the overhang is replaced with a nucleoside thiophosphate.

[0142] In certain embodiments, the antisense strand of a dsRNA has a 1-10 nucleotide, e.g., 0-3, 1-3, 2-4, 2-5, 4-10, 5-10, e.g., a 1, 2, 3, 4, 5, 6, 7, 8, 9, or 10 nucleotide, overhang at the 3′-end or the 5′-end. In one embodiment, the sense strand of a dsRNA has a 1-10 nucleotide, e.g., a 1, 2, 3, 4, 5, 6, 7, 8, 9, or 10 nucleotide, overhang at the 3′-end or the 5′-end. In another embodiment, one or more of the nucleotides in the overhang is replaced with a nucleoside thiophosphate.

[0143] In certain embodiments, the antisense strand of a dsRNA has a 1-10 nucleotides, e.g., a 1, 2, 3, 4, 5, 6, 7, 8, 9, or 10 nucleotide, overhang at the 3′-end or the 5′-end. In certain embodiments, the overhang on the sense strand or the antisense strand, or both, can include extended lengths longer than 10 nucleotides, e.g., 1-30 nucleotides, 2-30 nucleotides, 10-30 nucleotides, 10-25 nucleotides, 10-20 nucleotides, or 10-15 nucleotides in length. In certain embodiments, an extended overhang is on the sense strand of the duplex. In certain embodiments, an extended overhang is present on the 3′ end of the sense strand of the duplex. In certain embodiments, an extended overhang is present on the 5′ end of the sense strand of the duplex. In certain embodiments, an extended overhang is on the antisense strand of the duplex. In certain embodiments, an extended overhang is present on the 3′end of the antisense strand of the duplex. In certain embodiments, an extended overhang is present on the 5′end of the antisense strand of the duplex. In certain embodiments, one or more of the nucleotides in the extended overhang is replaced with a nucleoside thiophosphate. In certain embodiments, the overhang includes a self-complementary portion such that the overhang is capable of forming a hairpin structure that is stable under physiological conditions.

[0144] “Blunt” or “blunt end” means that there are no unpaired nucleotides at that end of the double stranded RNA agent, i.e., no nucleotide overhang. A “blunt ended” double stranded RNA agent is double stranded over its entire length, i.e., no nucleotide overhang at either end of the molecule. The RNAi agents of the invention include RNAi agents with no nucleotide overhang at one end (i.e., agents with one overhang and one blunt end) or with no nucleotide overhangs at either end. Most often such a molecule will be double-stranded over its entire length.

[0145] The term “antisense strand” or “guide strand” refers to the strand of an iRNA, e.g., a dsRNA, which includes a region that is substantially complementary to a target sequence, e.g., a CTNNB1 mRNA.

[0146] As used herein, the term “region of complementarity” refers to the region on the antisense strand that is substantially complementary to a sequence, for example a target sequence, e.g., a CTNNB1 nucleotide sequence, as defined herein. Where the region of complementarity is not fully complementary to the target sequence, the mismatches can be in the internal or terminal regions of the molecule. Generally, the most tolerated mismatches are in the terminal regions, e.g., within 5, 4, or 3 nucleotides of the 5′- or 3′-end of the iRNA. In some embodiments, a double stranded RNA agent of the invention includes a nucleotide mismatch in the antisense strand. In some embodiments, the antisense strand of the double stranded RNA agent of the invention includes no more than 4 mismatches with the target mRNA, e.g., the antisense strand includes 4, 3, 2, 1, or 0 mismatches with the target mRNA. In some embodiments, the antisense strand double stranded RNA agent of the invention includes no more than 4 mismatches with the sense strand, e.g., the antisense strand includes 4, 3, 2, 1, or 0 mismatches with the sense strand. In some embodiments, a double stranded RNA agent of the invention includes a nucleotide mismatch in the sense strand. In some embodiments, the sense strand of the double stranded RNA agent of the invention includes no more than 4 mismatches with the antisense strand, e.g., the sense strand includes 4, 3, 2, 1, or 0 mismatches with the antisense strand. In some embodiments, the nucleotide mismatch is, for example, within 5, 4, 3 nucleotides from the 3′-end of the iRNA. In another embodiment, the nucleotide mismatch is, for example, in the 3′-terminal nucleotide of the iRNA agent. In some embodiments, the mismatch(s) is not in the seed region.

[0147] Thus, an RNAi agent as described herein can contain one or more mismatches to the target sequence. In one embodiment, an RNAi agent as described herein contains no more than 3 mismatches (i.e., 3, 2, 1, or 0 mismatches). In one embodiment, an RNAi agent as described herein contains no more than 2 mismatches. In one embodiment, an RNAi agent as described herein contains no more than 1 mismatch. In one embodiment, an RNAi agent as described herein contains 0 mismatches. In certain embodiments, if the antisense strand of the RNAi agent contains mismatches to the target sequence, the mismatch can optionally be restricted to be within the last 5 nucleotides from either the 5′- or 3′-end of the region of complementarity. For example, in such embodiments, for a 23 nucleotide RNAi agent, the strand which is complementary to a region of a CTNNB1 gene, generally does not contain any mismatch within the central 13 nucleotides. The methods described herein or methods known in the art can be used to determine whether an RNAi agent containing a mismatch to a target sequence is effective in inhibiting the expression of a CTNNB1 gene.

[0148] Consideration of the efficacy of RNAi agents with mismatches in inhibiting expression of a CTNNB1 gene is important, especially if the particular region of complementarity in a CTNNB1 gene is known to have polymorphic sequence variation within the population.

[0149] The term “sense strand” or “passenger strand” as used herein, refers to the strand of an iRNA that includes a region that is substantially complementary to a region of the antisense strand as that term is defined herein.

[0150] As used herein, “substantially all of the nucleotides are modified” are largely but not wholly modified and can include not more than 5, 4, 3, 2, or 1 unmodified nucleotides.

[0151] As used herein, the term “cleavage region” refers to a region that is located immediately adjacent to the cleavage site. The cleavage site is the site on the target at which cleavage occurs. In some embodiments, the cleavage region comprises three bases on either end of, and immediately adjacent to, the cleavage site. In some embodiments, the cleavage region comprises two bases on either end of, and immediately adjacent to, the cleavage site. In some embodiments, the cleavage site specifically occurs at the site bound by nucleotides 10 and 11 of the antisense strand, and the cleavage region comprises nucleotides 11, 12 and 13.

[0152] As used herein, and unless otherwise indicated, the term “complementary,” when used to describe a first nucleotide sequence in relation to a second nucleotide sequence, refers to the ability of an oligonucleotide or polynucleotide comprising the first nucleotide sequence to hybridize and form a duplex structure under certain conditions with an oligonucleotide or polynucleotide comprising the second nucleotide sequence, as will be understood by the skilled person. Such conditions can, for example, be stringent conditions, where stringent conditions can include: 400 mM NaCl, 40 mM PIPES pH 6.4, 1 mM EDTA, 50° C. or 70° C. for 12-16 hours followed by washing (see, e.g., “Molecular Cloning: A Laboratory Manual, Sambrook, et al. (1989) Cold Spring Harbor Laboratory Press). Other conditions, such as physiologically relevant conditions as can be encountered inside an organism, can apply. The skilled person will be able to determine the set of conditions most appropriate for a test of complementarity of two sequences in accordance with the ultimate application of the hybridized nucleotides.

[0153] Complementary sequences within an iRNA, e.g., within a dsRNA as described herein, include base-pairing of the oligonucleotide or polynucleotide comprising a first nucleotide sequence to an oligonucleotide or polynucleotide comprising a second nucleotide sequence over the entire length of one or both nucleotide sequences. Such sequences can be referred to as “fully complementary” with respect to each other herein. However, where a first sequence is referred to as “substantially complementary” with respect to a second sequence herein, the two sequences can be fully complementary, or they can form one or more, but generally not more than 5, 4, 3, or 2 mismatched base pairs upon hybridization for a duplex up to 30 base pairs, while retaining the ability to hybridize under the conditions most relevant to their ultimate application, e.g., inhibition of gene expression, in vitro or in vivo. However, where two oligonucleotides are designed to form, upon hybridization, one or more single stranded overhangs, such overhangs shall not be regarded as mismatches with regard to the determination of complementarity. For example, a dsRNA comprising one oligonucleotide 21 nucleotides in length and another oligonucleotide 23 nucleotides in length, wherein the longer oligonucleotide comprises a sequence of 21 nucleotides that is fully complementary to the shorter oligonucleotide, can yet be referred to as “fully complementary” for the purposes described herein.

[0154] “Complementary” sequences, as used herein, can also include, or be formed entirely from, non-Watson-Crick base pairs or base pairs formed from non-natural and modified nucleotides, in so far as the above requirements with respect to their ability to hybridize are fulfilled. Such non-Watson-Crick base pairs include, but are not limited to, G:U Wobble or Hoogsteen base pairing.

[0155] The terms “complementary,” “fully complementary” and “substantially complementary” herein can be used with respect to the base matching between the sense strand and the antisense strand of a dsRNA, or between two oligonucletoides or polynucleotides, such as the antisense strand of a double stranded RNA agent and a target sequence, as will be understood from the context of their use.

[0156] As used herein, a polynucleotide that is “substantially complementary to at least part of” a messenger RNA (mRNA) refers to a polynucleotide that is substantially complementary to a contiguous portion of the mRNA of interest (e.g., an mRNA encoding a CTNNB1 gene). For example, a polynucleotide is complementary to at least a part of a CTNNB1 mRNA if the sequence is substantially complementary to a non-interrupted portion of an mRNA encoding a CTNNB1 gene.

[0157] Accordingly, in some embodiments, the antisense polynucleotides disclosed herein are fully complementary to the target CTNNB1 sequence. In other embodiments, the antisense polynucleotides disclosed herein are substantially complementary to the target CTNNB1 sequence and comprise a contiguous nucleotide sequence which is at least 80% complementary over its entire length to the equivalent region of the nucleotide sequence of any one of SEQ ID NOs:1, 3, 5, 7, or 9, or a fragment of any one of SEQ ID NOs:1, 3, 5, 7, or 9, such as about 85%, about 90%, about 91%, about 92%, about 93%, about 94%, about 95%, about 96%, about 97%, about 98%, or about 99% complementary.

[0158] In other embodiments, the antisense polynucleotides disclosed herein are substantially complementary to the target CTNNB1 sequence and comprise a contiguous nucleotide sequence which is at least about 80% complementary over its entire length to any one of the sense strand nucleotide sequences in any one of any one of Tables 2, 3, 5, or 6, or a fragment of any one of the sense strand nucleotide sequences in any one of Tables 2, 3, 5, or 6, such as about 85%, about 90%, about 91%, about 92%, about 93%, about 94%, about 95%, about 96%, about 97%, about 98%, about 99%, or 100% complementary.

[0159] In one embodiment, an RNAi agent of the disclosure includes a sense strand that is substantially complementary to an antisense polynucleotide which, in turn, is the same as a target CTNNB1 sequence, and wherein the sense strand polynucleotide comprises a contiguous nucleotide sequence which is at least about 80% complementary over its entire length to the equivalent region of the nucleotide sequence of SEQ ID NOs: 2, 4, 6, 8, or 10, or a fragment of any one of SEQ ID NOs:2, 4, 6, 8, or 10, such as about 85%, about 90%, about 91%, about 92%, about 93%, about 94%, about 95%, about 96%, about 97%, about 98%, about 99%, or 100% complementary.

[0160] In some embodiments, an iRNA of the invention includes a sense strand that is substantially complementary to an antisense polynucleotide which, in turn, is complementary to a target CTNNB1 sequence, and wherein the sense strand polynucleotide comprises a contiguous nucleotide sequence which is at least about 80% complementary over its entire length to any one of the antisense strand nucleotide sequences in any one of any one of Tables 2, 3, 5, or 6, or a fragment of any one of the antisense strand nucleotide sequences in any one of Tables 2, 3, 5, or 6, such as about 85%, about 90%, about 91%, about 92%, about 93%, about 94%, about 95%, about 96%, about 97%, about 98%, about 99%, or 100% complementary.

[0161] In general, an “iRNA” includes ribonucleotides with chemical modifications. Such modifications may include all types of modifications disclosed herein or known in the art. Any such modifications, as used in a dsRNA molecule, are encompassed by “iRNA” for the purposes of this specification and claims.

[0162] In certain embodiments of the instant disclosure, inclusion of a deoxy-nucleotide if present within an RNAi agent can be considered to constitute a modified nucleotide.

[0163] In an aspect of the invention, an agent for use in the methods and compositions of the invention is a single-stranded antisense oligonucleotide molecule that inhibits a target mRNA via an antisense inhibition mechanism. The single-stranded antisense oligonucleotide molecule is complementary to a sequence within the target mRNA. The single-stranded antisense oligonucleotides can inhibit translation in a stoichiometric manner by base pairing to the mRNA and physically obstructing the translation machinery, see Dias, N. et al., (2002) Mol Cancer Ther 1:347-355. The single-stranded antisense oligonucleotide molecule may be about 14 to about 30 nucleotides in length and have a sequence that is complementary to a target sequence. For example, the single-stranded antisense oligonucleotide molecule may comprise a sequence that is at least about 14, 15, 16, 17, 18, 19, 20, or more contiguous nucleotides from any one of the antisense sequences described herein.

[0164] The phrase “contacting a cell with an iRNA,” such as a dsRNA, as used herein, includes contacting a cell by any possible means. Contacting a cell with an iRNA includes contacting a cell in vitro with the iRNA or contacting a cell in vivo with the iRNA. The contacting may be done directly or indirectly. Thus, for example, the iRNA may be put into physical contact with the cell by the individual performing the method, or alternatively, the iRNA may be put into a situation that will permit or cause it to subsequently come into contact with the cell.

[0165] Contacting a cell in vitro may be done, for example, by incubating the cell with the iRNA.

[0166] Contacting a cell in vivo may be done, for example, by injecting the iRNA into or near the tissue where the cell is located, or by injecting the iRNA into another area, e.g., the bloodstream or the subcutaneous space, such that the agent will subsequently reach the tissue where the cell to be contacted is located. For example, the iRNA may contain or be coupled to a ligand, e.g., GalNAc, that directs the iRNA to a site of interest, e.g., the liver. Combinations of in vitro and in vivo methods of contacting are also possible. For example, a cell may also be contacted in vitro with an iRNA and subsequently transplanted into a subject.

[0167] In certain embodiments, contacting a cell with an iRNA includes “introducing” or “delivering the iRNA into the cell” by facilitating or effecting uptake or absorption into the cell. Absorption or uptake of an iRNA can occur through unaided diffusion or active cellular processes, or by auxiliary agents or devices. Introducing an iRNA into a cell may be in vitro or in vivo. For example, for in vivo introduction, iRNA can be injected into a tissue site or administered systemically. In vitro introduction into a cell includes methods known in the art such as electroporation and lipofection.

[0168] Further approaches are described herein below or are known in the art.

[0169] The term “cationic lipid” includes those lipids having one or two fatty acid or fatty aliphatic chains and an amino acid containing head group that may be protonated to form a cationic lipid at physiological pH. In some embodiments, a cationic lipid is referred to as an “amino acid conjugate cationic lipid.”

[0170] The term “biodegradable cationic lipid” refers to a cationic lipid having one or more biodegradable groups located in the mid- or distal section of a lipidic moiety (e.g., a hydrophobic chain) of the cationic lipid. The incorporation of the biodegradable group(s) into the cationic lipid results in faster metabolism and removal of the cationic lipid from the body following delivery of the active pharmaceutical ingredient to a target area.

[0171] The term “lipid nanoparticle” or “LNP” is a vesicle comprising a lipid layer encapsulating a pharmaceutically active molecule, such as a nucleic acid molecule, e.g., an iRNA or a plasmid from which an iRNA is transcribed. LNPs are described in, for example, U.S. Pat. Nos. 6,858,225, 6,815,432, 8,158,601, and 8,058,069, the entire contents of which are hereby incorporated herein by reference.

[0172] As used herein, a “subject” is an animal, such as a mammal, including a primate (such as a human, a non-human primate, e.g., a monkey, and a chimpanzee), a non-primate (such as a cow, a pig, a horse, a goat, a rabbit, a sheep, a hamster, a guinea pig, a cat, a dog, a rat, or a mouse), or a bird that expresses the target gene, either endogenously or heterologously. In an embodiment, the subject is a human, such as a human being treated or assessed for a disease or disorder that would benefit from reduction in CTNNB1 expression; a human at risk for a disease or disorder that would benefit from reduction in CTNNB1 expression; a human having a disease or disorder that would benefit from reduction in CTNNB1 expression; or human being treated for a disease or disorder that would benefit from reduction in CTNNB1 expression as described herein. In some embodiments, the subject is a female human. In other embodiments, the subject is a male human. In one embodiment, the subject is an adult subject. In another embodiment, the subject is a pediatric subject.

[0173] As used herein, the terms “treating” or “treatment” refer to a beneficial or desired result, such as reducing at least one sign or symptom of a CTNNB1-associated disorder in a subject. Treatment also includes a reduction of one or more sign or symptoms associated with unwanted CTNNB1 expression; diminishing the extent of unwanted CTNNB1 activation or stabilization; amelioration or palliation of unwanted CTNNB1 activation or stabilization. “Treatment” can also mean prolonging survival as compared to expected survival in the absence of treatment.

[0174] The term “lower” in the context of the level of CTNNB1 in a subject or a disease marker or symptom refers to a statistically significant decrease in such level. The decrease can be, for example, at least 10%, 15%, 20%, 25%, 30%, %, 40%, 45%, 50%, 55%, 60%, 65%, 70%, 75%, 80%, 85%, 90%, 95%, or more. In certain embodiments, a decrease is at least 20%. In certain embodiments, the decrease is at least 50% in a disease marker, e.g., protein or gene expression level. “Lower” in the context of the level of CTNNB1 in a subject is a decrease to a level accepted as within the range of normal for an individual without such disorder. In certain embodiments, “lower” is the decrease in the difference between the level of a marker or symptom for a subject suffering from a disease and a level accepted within the range of normal for an individual. The term “lower” can also be used in association with normalizing a symptom of a disease or condition, i.e. decreasing the difference between a level in a subject suffering from a CTNNB1-associated disorder towards or to a level in a normal subject not suffering from a CTNNB1-associated disorder. As used herein, if a disease is associated with an elevated value for a symptom, “normal” is considered to be the upper limit of normal. If a disease is associated with a decreased value for a symptom, “normal” is considered to be the lower limit of normal.

[0175] As used herein, “prevention” or “preventing,” when used in reference to a disease, disorder or condition thereof, may be treated or ameliorated by a reduction in expression of a CTNNB1 gene, refers to a reduction in the likelihood that a subject will develop a symptom associated with such a disease, disorder, or condition, e.g., a symptom of a CTNNB1-associated disorder, e.g., cancer, e.g., hepatocellular carcinoma. The failure to develop a disease, disorder or condition, or the reduction in the development of a symptom associated with such a disease, disorder or condition (e.g., by at least about 10% on a clinically accepted scale for that disease or disorder), or the exhibition of delayed symptoms delayed (e.g., by days, weeks, months or years) is considered effective prevention.

[0176] As used herein, the term “beta-catenin-associated disorder” or “CTNNB1-associated disorder,” is a disease or disorder that is caused by, or associated with, CTNNB1 gene expression or CTNNB1 protein production. The term “CTNNB1-associated disorder” includes a disease, disorder or condition that would benefit from a decrease in CTNNB1 gene expression, replication, or protein activity. In some embodiments, the CTNNB1-associated disorder is cancer, e.g., hepatocellular carcinoma.

[0177] The term “cancer” is used herein to refer to a group of cells that exhibit abnormally high levels of proliferation and growth. A cancer may be benign (also referred to as a benign tumor), pre-malignant, or malignant. Cancer cells may be solid cancer cells or leukemic cancer cells. The term “cancer growth” is used herein to refer to proliferation or growth by a cell or cells that comprise a cancer that leads to a corresponding increase in the size or extent of the cancer.

[0178] Examples of cancer include but are not limited to, carcinoma, lymphoma, blastoma, sarcoma, myeloma and leukemia. In some embodiments, the cancer comprises a solid tumor cancer. In other embodiments, the cancer comprises a blood based cancer, e.g., leukemia, lymphoma or myeloma.

[0179] More particular nonlimiting examples of such cancers include squamous cell cancer, small-cell lung cancer, pituitary cancer, esophageal cancer, astrocytoma, soft tissue sarcoma, non-small cell lung cancer (including squamous cell non-small cell lung cancer), adenocarcinoma of the lung, squamous carcinoma of the lung, cancer of the peritoneum, hepatocellular cancer, gastrointestinal cancer, pancreatic cancer, glioblastoma, cervical cancer, ovarian cancer, liver cancer, bladder cancer, hepatoma, breast cancer, colon cancer, colorectal cancer, endometrial or uterine carcinoma, salivary gland carcinoma, kidney cancer, renal cell carcinoma, hepatocellular carcinoma, hepatoblastomas, liver cancer, prostate cancer, vulval cancer, thyroid cancer, hepatic carcinoma, brain cancer, endometrial cancer, testis cancer, cholangiocarcinoma, gallbladder carcinoma, gastric cancer, melanoma, and various types of head and neck cancer (including squamous cell carcinoma of the head and neck).

[0180] In some embodiments, the CTNNB1-associated disorder is hepatocellular carcinoma (HCC).

[0181] As used herein, the term “hepatocellular carcinoma” refers to a major type of primary liver cancer and one of the rare human neoplasms etiologically linked to viral factors. Chronic infections with the hepatitis B virus (HBV) and the hepatitis C virus (HCV) have been implicated in about 80% of cases worldwide (Wang W, et al., J Gastroenterol. 2017 April; 52(4):419-431). Genetic mutations and abnormal activation of signal transduction pathways involved in cell proliferation, apoptosis, metabolism, splicing, and the cell cycle are known to contribute to the development of HCC. In particular, the Wnt/β-catenin signaling pathway was known to be activated in up to 50% of HCC (Lee J M, et al. Cancer Lett. 2014 Feb. 1; 343(1):90-7; Vilchez V, et al. World J Gastroenterol. 2016 Jan. 14; 22(2):823-32). The Wnt/β-catenin pathway regulates multiple cellular processes that are involved in the initiation, growth, survival, migration, differentiation, and apoptosis of HCC (Wang Z, et al., Mol Clin Oncol. 2015 July; 3(4):936-940). Mutations in β-catenin have been identified in these tumors, and β-catenin mutation has also been shown to affect the prognosis of HCC. (Prange W, et al., J Pathol. 2003; 201:250-259; Torbenson M, et al., Am J Clin Pathol. 2004; 122:377-382).

[0182] “Therapeutically effective amount,” as used herein, is intended to include the amount of an RNAi agent that, when administered to a subject having a CTNNB1-associated disorder, is sufficient to effect treatment of the disease (e.g., by diminishing, ameliorating, or maintaining the existing disease or one or more symptoms of disease). The “therapeutically effective amount” may vary depending on the RNAi agent, how the agent is administered, the disease and its severity and the history, age, weight, family history, genetic makeup, the types of preceding or concomitant treatments, if any, and other individual characteristics of the subject to be treated.

[0183] “Prophylactically effective amount,” as used herein, is intended to include the amount of an RNAi agent that, when administered to a subject having a CTNNB1-associated disorder, is sufficient to prevent or ameliorate the disease or one or more symptoms of the disease. Ameliorating the disease includes slowing the course of the disease or reducing the severity of later-developing disease. The “prophylactically effective amount” may vary depending on the RNAi agent, how the agent is administered, the degree of risk of disease, and the history, age, weight, family history, genetic makeup, the types of preceding or concomitant treatments, if any, and other individual characteristics of the patient to be treated.

[0184] A “therapeutically-effective amount” or “prophylactically effective amount” also includes an amount of an RNAi agent that produces some desired effect at a reasonable benefit/risk ratio applicable to any treatment. The iRNA employed in the methods of the present invention may be administered in a sufficient amount to produce a reasonable benefit/risk ratio applicable to such treatment.

[0185] The phrase “pharmaceutically acceptable” is employed herein to refer to those compounds, materials, compositions, or dosage forms which are, within the scope of sound medical judgment, suitable for use in contact with the tissues of human subjects and animal subjects without excessive toxicity, irritation, allergic response, or other problem or complication, commensurate with a reasonable benefit/risk ratio.

[0186] The phrase “pharmaceutically-acceptable carrier” as used herein means a pharmaceutically-acceptable material, composition, or vehicle, such as a liquid or solid filler, diluent, excipient, manufacturing aid (e.g., lubricant, talc magnesium, calcium or zinc stearate, or steric acid), or solvent encapsulating material, involved in carrying or transporting the subject compound from one organ, or portion of the body, to another organ, or portion of the body. Each carrier must be “acceptable” in the sense of being compatible with the other ingredients of the formulation and not injurious to the subject being treated. Such carriers are known in the art. Pharmaceutically acceptable carriers include carriers for administration by injection.

[0187] The term “sample,” as used herein, includes a collection of similar fluids, cells, or tissues isolated from a subject, as well as fluids, cells, or tissues present within a subject. Examples of biological fluids include blood, serum and serosal fluids, plasma, cerebrospinal fluid, ocular fluids, lymph, urine, saliva, and the like. Tissue samples may include samples from tissues, organs, or localized regions. For example, samples may be derived from particular organs, parts of organs, or fluids or cells within those organs. In certain embodiments, samples may be derived from the liver (e.g., whole liver or certain segments of liver or certain types of cells in the liver, such as, e.g., hepatocytes). In some embodiments, a “sample derived from a subject” refers to urine obtained from the subject. A “sample derived from a subject” can refer to blood or blood derived serum or plasma from the subject.

### II. iRNAs of the Invention

[0188] The present invention provides iRNAs which inhibit the expression of a CTNNB1 gene. In certain embodiments, the iRNA includes double stranded ribonucleic acid (dsRNA) molecules for inhibiting the expression of a CTNNB1 gene in a cell, such as a cell within a subject, e.g., a mammal, such as a human susceptible to developing a CTNNB1-associated disorder, e.g., cancer, e.g., hepatocellular carcinoma. The dsRNAi agent includes an antisense strand having a region of complementarity which is complementary to at least a part of an mRNA formed in the expression of a CTNNB1 gene. The region of complementarity is about 19-30 nucleotides in length (e.g., about 30, 29, 28, 27, 26, 25, 24, 23, 22, 21, 20, or 19 nucleotides in length).

[0189] Upon contact with a cell expressing the CTNNB1 gene, the iRNA inhibits the expression of the CTNNB1 gene (e.g., a human, a primate, a non-primate, or a rat CTNNB1 gene) by at least about 50% as assayed by, for example, a PCR or branched DNA (bDNA)-based method, or by a protein-based method, such as by immunofluorescence analysis, using, for example, western blotting or flow cytometric techniques. In certain embodiments, inhibition of expression is determined by the qPCR method provided in the examples herein with the siRNA at, e.g., a 10 nM concentration, in an appropriate organism cell line provided therein. In certain embodiments, inhibition of expression in vivo is determined by knockdown of the human gene in a rodent expressing the human gene, e.g., a mouse or an AAV-infected mouse expressing the human target gene, e.g., when administered as single dose, e.g., at 3 mg/kg at the nadir of RNA expression.

[0190] A dsRNA includes two RNA strands that are complementary and hybridize to form a duplex structure under conditions in which the dsRNA will be used. One strand of a dsRNA (the antisense strand) includes a region of complementarity that is substantially complementary, and generally fully complementary, to a target sequence. The target sequence can be derived from the sequence of an mRNA formed during the expression of a CTNNB1 gene. The other strand (the sense strand) includes a region that is complementary to the antisense strand, such that the two strands hybridize and form a duplex structure when combined under suitable conditions. As described elsewhere herein and as known in the art, the complementary sequences of a dsRNA can also be contained as self-complementary regions of a single nucleic acid molecule, as opposed to being on separate oligonucleotides.

[0191] Generally, the duplex structure is 15 to 30 base pairs in length, e.g., 15-29, 15-28, 15-27, 15-26, 15-25, 15-24, 15-23, 15-22, 15-21, 15-20, 15-19, 15-18, 15-17, 18-30, 18-29, 18-28, 18-27, 18-26, 18-25, 18-24, 18-23, 18-22, 18-21, 18-20, 19-30, 19-29, 19-28, 19-27, 19-26, 19-25, 19-24, 19-23, 19-22, 19-21, 19-20, 20-30, 20-29, 20-28, 20-27, 20-26, 20-25, 20-24, 20-23, 20-22, 20-21, 21-30, 21-29, 21-28, 21-27, 21-26, 21-25, 21-24, 21-23, or 21-22 base pairs in length. In certain embodiments, the duplex structure is 18 to 25 base pairs in length, e.g., 18-25, 18-24, 18-23, 18-22, 18-21, 18-20, 19-25, 19-24, 19-23, 19-22, 19-21, 19-20, 20-25, 20-24, 20-23, 20-22, 20-21, 21-25, 21-24, 21-23, 21-22, 22-25, 22-24, 22-23, 23-25, 23-24 or 24-25 base pairs in length, for example, 19-21 basepairs in length. Ranges and lengths intermediate to the above recited ranges and lengths are also contemplated to be part of the disclosure.

[0192] Similarly, the region of complementarity to the target sequence is 15 to 30 nucleotides in length, e.g., 15-29, 15-28, 15-27, 15-26, 15-25, 15-24, 15-23, 15-22, 15-21, 15-20, 15-19, 15-18, 15-17, 18-30, 18-29, 18-28, 18-27, 18-26, 18-25, 18-24, 18-23, 18-22, 18-21, 18-20, 19-30, 19-29, 19-28, 19-27, 19-26, 19-25, 19-24, 19-23, 19-22, 19-21, 19-20, 20-30, 20-29, 20-28, 20-27, 20-26, 20-25, 20-24,20-23, 20-22, 20-21, 21-30, 21-29, 21-28, 21-27, 21-26, 21-25, 21-24, 21-23, or 21-22 nucleotides in length, for example 19-23 nucleotides in length or 21-23 nucleotides in length. Ranges and lengths intermediate to the above recited ranges and lengths are also contemplated to be part of the disclosure.

[0193] In some embodiments, the duplex structure is 19 to 30 base pairs in length. Similarly, the region of complementarity to the target sequence is 19 to 30 nucleotides in length.

[0194] In some embodiments, the dsRNA is about 19 to about 23 nucleotides in length, or about 25 to about 30 nucleotides in length. In general, the dsRNA is long enough to serve as a substrate for the Dicer enzyme. For example, it is well-known in the art that dsRNAs longer than about 21-23 nucleotides in length may serve as substrates for Dicer. As the ordinarily skilled person will also recognize, the region of an RNA targeted for cleavage will most often be part of a larger RNA molecule, often an mRNA molecule. Where relevant, a “part” of an mRNA target is a contiguous sequence of an mRNA target of sufficient length to allow it to be a substrate for RNAi-directed cleavage (i.e., cleavage through a RISC pathway).

[0195] One of skill in the art will also recognize that the duplex region is a primary functional portion of a dsRNA, e.g., a duplex region of about 19 to about 30 base pairs, e.g., about 19-30, 19-29, 19-28, 19-27, 19-26, 19-25, 19-24, 19-23, 19-22, 19-21, 19-20, 20-30, 20-29, 20-28, 20-27, 20-26, 20-25, 20-24, 20-23, 20-22, 20-21, 21-30, 21-29, 21-28, 21-27, 21-26, 21-25, 21-24, 21-23, or 21-22 base pairs. Thus, in one embodiment, to the extent that it becomes processed to a functional duplex, of e.g., 15-30 base pairs, that targets a desired RNA for cleavage, an RNA molecule or complex of RNA molecules having a duplex region greater than 30 base pairs is a dsRNA. Thus, an ordinarily skilled artisan will recognize that in one embodiment, a miRNA is a dsRNA. In another embodiment, a dsRNA is not a naturally occurring miRNA. In another embodiment, an iRNA agent useful to target CTNNB1 gene expression is not generated in the target cell by cleavage of a larger dsRNA.

[0196] A dsRNA as described herein can further include one or more single-stranded nucleotide overhangs, e.g., 1-4, 2-4, 1-3, 2-3, 1, 2, 3, or 4 nucleotides. dsRNAs having at least one nucleotide overhang can have superior inhibitory properties relative to their blunt-ended counterparts. A nucleotide overhang can comprise or consist of a nucleotide/nucleoside analog, including a deoxynucleotide/nucleoside. The overhang(s) can be on the sense strand, the antisense strand, or any combination thereof. Furthermore, the nucleotide(s) of an overhang can be present on the 5′-end, 3′-end, or both ends of an antisense or sense strand of a dsRNA.

[0197] A dsRNA can be synthesized by standard methods known in the art. Double stranded RNAi compounds of the invention may be prepared using a two-step procedure. First, the individual strands of the double stranded RNA molecule are prepared separately. Then, the component strands are annealed. The individual strands of the siRNA compound can be prepared using solution-phase or solid-phase organic synthesis or both. Organic synthesis offers the advantage that the oligonucleotide strands comprising unnatural or modified nucleotides can be easily prepared. Similarly, single-stranded oligonucleotides of the invention can be prepared using solution-phase or solid-phase organic synthesis or both.

[0198] In an aspect, a dsRNA of the invention includes at least two nucleotide sequences, a sense sequence and an anti-sense sequence. The sense strand is selected from the group of sequences provided in any one of Tables 2, 3, 5, and 6, and the corresponding antisense strand of the sense strand is selected from the group of sequences of any one of Tables 2, 3, 5, and 6. In this aspect, one of the two sequences is complementary to the other of the two sequences, with one of the sequences being substantially complementary to a sequence of an mRNA generated in the expression of a CTNNB1 gene. As such, in this aspect, a dsRNA will include two oligonucleotides, where one oligonucleotide is described as the sense strand in any one of Tables 2, 3, 5, or 6, and the second oligonucleotide is described as the corresponding antisense strand of the sense strand in any one of Tables 2, 3, 5, or 6.

[0199] In certain embodiments, the substantially complementary sequences of the dsRNA are contained on separate oligonucleotides. In other embodiments, the substantially complementary sequences of the dsRNA are contained on a single oligonucleotide.

[0200] It will be understood that, although the sequences in, for example, Table 2, are not described as modified or conjugated sequences, the RNA of the iRNA of the invention e.g., a dsRNA of the invention, may comprise any one of the sequences set forth in any one of Tables 2, 3, 5, or 6 that is un-modified, un-conjugated, or modified or conjugated differently than described therein. In other words, the invention encompasses dsRNA of Tables 2, 3, 5, or 6 which are un-modified, un-conjugated, modified, or conjugated, as described herein. For example, although the sense strands of the agents of the invention shown in Table 5 are conjugated to an L96 ligand, these agents may be unconjugated as described herein.

[0201] The skilled person is well aware that dsRNAs having a duplex structure of about 20 to 23 base pairs, e.g., 21, base pairs have been hailed as particularly effective in inducing RNA interference (Elbashir et al., EMBO 2001, 20:6877-6888). However, others have found that shorter or longer RNA duplex structures can also be effective (Chu and Rana (2007) RNA 14:1714-1719; Kim et al. (2005) Nat Biotech 23:222-226). In the embodiments described above, by virtue of the nature of the oligonucleotide sequences provided in any one of Tables 2, 3, 5, or 6. dsRNAs described herein can include at least one strand of a length of minimally 21 nucleotides. It can be reasonably expected that shorter duplexes having any one of the sequences in any one of Tables 2, 3, 5, or 6 minus only a few nucleotides on one or both ends can be similarly effective as compared to the dsRNAs described above. Hence, dsRNAs having a sequence of at least 19, 20, or more contiguous nucleotides derived from any one of the sequences of any one of Tables 2, 3, 5, or 6, and differing in their ability to inhibit the expression of a CTNNB1 gene by not more than about 5, 10, 15, 20, 25, or 30% inhibition from a dsRNA comprising the full sequence, are contemplated to be within the scope of the present invention.

[0202] In addition, the RNAs provided in Tables 2, 3, 5, or 6 identify a site(s) in a CTNNB1 transcript that is susceptible to RISC-mediated cleavage. As such, the present invention further features iRNAs that target within one of these sites. As used herein, an iRNA is said to target within a particular site of an RNA transcript if the iRNA promotes cleavage of the transcript anywhere within that particular site. Such an iRNA will generally include at least about 19 contiguous nucleotides from any one of the sequences provided in any one of Tables 2, 3, 5, or 6 coupled to additional nucleotide sequences taken from the region contiguous to the selected sequence in a CTNNB1 gene.

### III. Modified iRNAs of the Invention

[0203] In certain embodiments, the RNA of the iRNA of the invention e.g., a dsRNA, is un-modified, and does not comprise, e.g., chemical modifications or conjugations known in the art and described herein. In other embodiments, the RNA of an iRNA of the invention, e.g., a dsRNA, is chemically modified to enhance stability or other beneficial characteristics. In certain embodiments of the invention, substantially all of the nucleotides of an iRNA of the invention are modified. In other embodiments of the invention, all of the nucleotides of an iRNA or substantially all of the nucleotides of an iRNA are modified, i.e., not more than 5, 4, 3, 2, or 1 unmodified nucleotides are present in a strand of the iRNA.

[0204] The nucleic acids featured in the invention can be synthesized or modified by methods well established in the art, such as those described in “Current protocols in nucleic acid chemistry,” Beaucage, S. L. et al. (Edrs.), John Wiley & Sons, Inc., New York, NY, USA, which is hereby incorporated herein by reference. Modifications include, for example, end modifications, e.g., 5′-end modifications (phosphorylation, conjugation, inverted linkages) or 3′-end modifications (conjugation, DNA nucleotides, inverted linkages, etc.); base modifications, e.g., replacement with stabilizing bases, destabilizing bases, or bases that base pair with an expanded repertoire of partners, removal of bases (abasic nucleotides), or conjugated bases; sugar modifications (e.g., at the 2′-position or 4′-position) or replacement of the sugar; or backbone modifications, including modification or replacement of the phosphodiester linkages. Specific examples of iRNA compounds useful in the embodiments described herein include, but are not limited to RNAs containing modified backbones or no natural internucleoside linkages. RNAs having modified backbones include, among others, those that do not have a phosphorus atom in the backbone. For the purposes of this specification, and as sometimes referenced in the art, modified RNAs that do not have a phosphorus atom in their internucleoside backbone can also be considered to be oligonucleosides. In some embodiments, a modified iRNA will have a phosphorus atom in its internucleoside backbone.

[0205] Modified RNA backbones include, for example, phosphorothioates, chiral phosphorothioates, phosphorodithioates, phosphotriesters, aminoalkylphosphotriesters, methyl and other alkyl phosphonates including 3′-alkylene phosphonates and chiral phosphonates, phosphinates, phosphoramidates including 3′-amino phosphoramidate and aminoalkylphosphoramidates, thionophosphoramidates, thionoalkylphosphonates, thionoalkylphosphotriesters, and boranophosphates having normal 3′-5′ linkages, 2′-5′-linked analogs of these, and those having inverted polarity wherein the adjacent pairs of nucleoside units are linked 3′-5′ to 5′-3′ or 2′-5′ to 5′-2′. Various salts, mixed salts and free acid forms are also included. In some embodiments of the invention, the dsRNA agents of the invention are in a free acid form. In other embodiments of the invention, the dsRNA agents of the invention are in a salt form. In one embodiment, the dsRNA agents of the invention are in a sodium salt form. In certain embodiments, when the dsRNA agents of the invention are in the sodium salt form, sodium ions are present in the agent as counterions for substantially all of the phosphodiester and/or phosphorothiotate groups present in the agent. Agents in which substantially all of the phosphodiester and/or phosphorothioate linkages have a sodium counterion include not more than 5, 4, 3, 2, or 1 phosphodiester and/or phosphorothioate linkages without a sodium counterion. In some embodiments, when the dsRNA agents of the invention are in the sodium salt form, sodium ions are present in the agent as counterions for all of the phosphodiester and/or phosphorothiotate groups present in the agent.

[0206] Representative U.S. patents that teach the preparation of the above phosphorus-containing linkages include, but are not limited to, U.S. Pat. Nos. 3,687,808; 4,469,863; 4,476,301; 5,023,243; 5,177,195; 5,188,897; 5,264,423; 5,276,019; 5,278,302; 5,286,717; 5,321,131; 5,399,676; 5,405,939; 5,453,496; 5,455,233; 5,466,677; 5,476,925; 5,519,126; 5,536,821; 5,541,316; 5,550,111; 5,563,253; 5,571,799; 5,587,361; 5,625,050; 6,028,188; 6,124,445; 6,160,109; 6,169,170; 6,172,209; 6,239,265; 6,277,603; 6,326,199; 6,346,614; 6,444,423; 6,531,590; 6,534,639; 6,608,035; 6,683,167; 6,858,715; 6,867,294; 6,878,805; 7,015,315; 7,041,816; 7,273,933; 7,321,029; and RE39464, the entire contents of each of which are hereby incorporated herein by reference.

[0207] Modified RNA backbones that do not include a phosphorus atom therein have backbones that are formed by short chain alkyl or cycloalkyl internucleoside linkages, mixed heteroatoms and alkyl or cycloalkyl internucleoside linkages, or one or more short chain heteroatomic or heterocyclic internucleoside linkages. These include those having morpholino linkages (formed in part from the sugar portion of a nucleoside); siloxane backbones; sulfide, sulfoxide and sulfone backbones; formacetyl and thioformacetyl backbones; methylene formacetyl and thioformacetyl backbones; alkene containing backbones; sulfamate backbones; methyleneimino and methylenehydrazino backbones; sulfonate and sulfonamide backbones; amide backbones; and others having mixed N, O, S, and CH₂ component parts.

[0208] Representative U.S. patents that teach the preparation of the above oligonucleosides include, but are not limited to, U.S. Pat. Nos. 5,034,506; 5,166,315; 5,185,444; 5,214,134; 5,216,141; 5,235,033; 5,64,562; 5,264,564; 5,405,938; 5,434,257; 5,466,677; 5,470,967; 5,489,677; 5,541,307; 5,561,225; 5,596,086; 5,602,240; 5,608,046; 5,610,289; 5,618,704; 5,623,070; 5,663,312; 5,633,360; 5,677,437; and 5,677,439, the entire contents of each of which are hereby incorporated herein by reference.

[0209] Suitable RNA mimetics are contemplated for use in iRNAs provided herein, in which both the sugar and the internucleoside linkage, i.e., the backbone, of the nucleotide units are replaced with novel groups. The base units are maintained for hybridization with an appropriate nucleic acid target compound. One such oligomeric compound in which an RNA mimetic that has been shown to have excellent hybridization properties is referred to as a peptide nucleic acid (PNA). In PNA compounds, the sugar backbone of an RNA is replaced with an amide containing backbone, in particular an aminoethylglycine backbone. The nucleobases are retained and are bound directly or indirectly to aza nitrogen atoms of the amide portion of the backbone. Representative US patents that teach the preparation of PNA compounds include, but are not limited to, U.S. Pat. Nos. 5,539,082; 5,714,331; and 5,719,262, the entire contents of each of which are hereby incorporated herein by reference.

[0210] Additional PNA compounds suitable for use in the iRNAs of the invention are described in, for example, in Nielsen et al., Science, 1991, 254, 1497-1500.

[0211] Some embodiments featured in the invention include RNAs with phosphorothioate backbones and oligonucleosides with heteroatom backbones, and in particular —CH₂—NH—CH₂—, —CH₂—N(CH₃)—O—CH₂—[known as a methylene (methylimino) or MMI backbone], —CH₂—O—N(CH₃)—CH₂—, —CH₂—N(CH₃)—N(CH₃)—CH₂— and —N(CH₃)—CH₂—CH₂— of the above-referenced U.S. Pat. No. 5,489,677, and the amide backbones of the above-referenced U.S. Pat. No. 5,602,240. In some embodiments, the RNAs featured herein have morpholino backbone structures of the above-referenced U.S. Pat. No. 5,034,506. The native phosphodiester backbone can be represented as O—P(O)(OH)—OCH2-.

[0212] Modified RNAs can also contain one or more substituted sugar moieties. The iRNAs, e.g., dsRNAs, featured herein can include one of the following at the 2′-position: OH; F; O-, S-, or N-alkyl; O-, S-, or N-alkenyl; O-, S- or N-alkynyl; or O-alkyl-O-alkyl, wherein the alkyl, alkenyl and alkynyl can be substituted or unsubstituted C1 to C₁₀ alkyl or C₂ to C₁₀ alkenyl and alkynyl. Exemplary suitable modifications include O[(CH₂)ₙO] ₘCH₃, O(CH₂)·ₙOCH₃, O(CH₂)˜NH₂, O(CH₂)ₙCH₃, O(CH₂)ₙONH₂, and O(CH₂)ₙON[(CH₂)˜CH₃)]₂, where n and m are from 1 to about 10. In other embodiments, dsRNAs include one of the following at the 2′ position: C₁ to C₁₀ lower alkyl, substituted lower alkyl, alkaryl, aralkyl, O-alkaryl or O-aralkyl, SH, SCH₃, OCN, Cl, Br, CN, CF₃, OCF₃, SOCH₃, SO₂CH₃, ONO₂, NO₂, N₃, NH₂, heterocycloalkyl, heterocycloalkaryl, aminoalkylamino, polyalkylamino, substituted silyl, an RNA cleaving group, a reporter group, an intercalator, a group for improving the pharmacokinetic properties of an iRNA, or a group for improving the pharmacodynamic properties of an iRNA, and other substituents having similar properties. In some embodiments, the modification includes a 2′-methoxyethoxy (2′-O—CH₂CH₂OCH₃, also known as 2′-O-(2-methoxyethyl) or 2′-MOE) (Martin et al., Helv. Chim. Acta, 1995, 78:486-504) i.e., an alkoxy-alkoxy group. Another exemplary modification is 2′-dimethylaminooxyethoxy, i.e., a O(CH₂)₂ON(CH₃)₂ group, also known as 2′-DMAOE, as described in examples herein below, and 2′-dimethylaminoethoxyethoxy (also known in the art as 2′-O-dimethylaminoethoxyethyl or 2′-DMAEOE), i.e., 2′-O—CH₂—O—CH₂—N(CH₃)₂. Further exemplary modifications include: 5′-Me-2′-F nucleotides, 5′-Me-2′-OMe nucleotides, 5′-Me-2′-deoxynucleotides, (both R and S isomers in these three families); 2′-alkoxyalkyl; and 2′-NMA (N-methylacetamide).

[0213] Other modifications include 2′-methoxy (2′-OCH₃), 2′-aminopropoxy (2′-OCH₂CH₂CH₂NH₂) and 2′-fluoro (2′-F). Similar modifications can also be made at other positions on the RNA of an iRNA, particularly the 3′ position of the sugar on the 3′ terminal nucleotide or in 2′-5′ linked dsRNAs and the 5′ position of 5′ terminal nucleotide. iRNAs can also have sugar mimetics such as cyclobutyl moieties in place of the pentofuranosyl sugar. Representative US patents that teach the preparation of such modified sugar structures include, but are not limited to, U.S. Pat. Nos. 4,981,957; 5,118,800; 5,319,080; 5,359,044; 5,393,878; 5,446,137; 5,466,786; 5,514,785; 5,519,134; 5,567,811; 5,576,427; 5,591,722; 5,597,909; 5,610,300; 5,627,053; 5,639,873; 5,646,265; 5,658,873; 5,670,633; and 5,700,920, certain of which are commonly owned with the instant application. The entire contents of each of the foregoing are hereby incorporated herein by reference.

[0214] An iRNA can also include nucleobase (often referred to in the art simply as “base”) modifications or substitutions. As used herein, “unmodified” or “natural” nucleobases include the purine bases adenine (A) and guanine (G), and the pyrimidine bases thymine (T), cytosine (C), and uracil (U). Modified nucleobases include other synthetic and natural nucleobases such as deoxythimidine (dT), 5-methylcytosine (5-me-C), 5-hydroxymethyl cytosine, xanthine, hypoxanthine, 2-aminoadenine, 6-methyl and other alkyl derivatives of adenine and guanine, 2-propyl and other alkyl derivatives of adenine and guanine, 2-thiouracil, 2-thiothymine and 2-thiocytosine, 5-halouracil and cytosine, 5-propynyl uracil and cytosine, 6-azo uracil, cytosine and thymine, 5-uracil (pseudouracil), 4-thiouracil, 8-halo, 8-amino, 8-thiol, 8-thioalkyl, 8-hydroxyl anal other 8-substituted adenines and guanines, 5-halo, particularly 5-bromo, 5-trifluoromethyl and other 5-substituted uracils and cytosines, 7-methylguanine and 7-methyladenine, 8-azaguanine and 8-azaadenine, 7-deazaguanine and 7-daazaadenine and 3-deazaguanine and 3-deazaadenine. Further nucleobases include those disclosed in U.S. Pat. No. 3,687,808, those disclosed in Modified Nucleosides in Biochemistry, Biotechnology and Medicine, Herdewijn, P. ed. Wiley-VCH, 2008; those disclosed in The Concise Encyclopedia Of Polymer Science And Engineering, pages 858-859, Kroschwitz, J. L, ed. John Wiley & Sons, 1990, these disclosed by Englisch et al., Angewandte Chemie, International Edition, 1991, 30, 613, and those disclosed by Sanghvi, Y S., Chapter 15, dsRNA Research and Applications, pages 289-302, Crooke, S. T. and Lebleu, B., Ed., CRC Press, 1993. Certain of these nucleobases are particularly useful for increasing the binding affinity of the oligomeric compounds featured in the invention. These include 5-substituted pyrimidines, 6-azapyrimidines and N-2, N-6 and 0-6 substituted purines, including 2-aminopropyladenine, 5-propynyluracil and 5-propynylcytosine. 5-methylcytosine substitutions have been shown to increase nucleic acid duplex stability by 0.6-1.2° C. (Sanghvi, Y. S., Crooke, S. T. and Lebleu, B., Eds., dsRNA Research and Applications, CRC Press, Boca Raton, 1993, pp. 276-278) and are exemplary base substitutions, even more particularly when combined with 2′-O-methoxyethyl sugar modifications.

[0215] Representative U.S. patents that teach the preparation of certain of the above noted modified nucleobases as well as other modified nucleobases include, but are not limited to, the above noted U.S. Pat. Nos. 3,687,808, 4,845,205; 5,130,30; 5,134,066; 5,175,273; 5,367,066; 5,432,272; 5,457,187; 5,459,255; 5,484,908; 5,502,177; 5,525,711; 5,552,540; 5,587,469; 5,594,121, 5,596,091; 5,614,617; 5,681,941; 5,750,692; 6,015,886; 6,147,200; 6,166,197; 6,222,025; 6,235,887; 6,380,368; 6,528,640; 6,639,062; 6,617,438; 7,045,610; 7,427,672; and 7,495,088, the entire contents of each of which are hereby incorporated herein by reference.

[0216] In some embodiments, an RNAi agent of the disclosure can also be modified to include one or more bicyclic sugar moieties. A “bicyclic sugar” is a furanosyl ring modified by a ring formed by the bridging of two carbons, whether adjacent or non-adjacent. A “bicyclic nucleoside” (“BNA”) is a nucleoside having a sugar moiety comprising a ring formed by bridging two carbons, whether adjacent or non-adjacent, of the sugar ring, thereby forming a bicyclic ring system. In certain embodiments, the bridge connects the 4′-carbon and the 2′-carbon of the sugar ring, optionally, via the 2′-acyclic oxygen atom. Thus, in some embodiments an agent of the invention may include one or more locked nucleic acids (LNA). A locked nucleic acid is a nucleotide having a modified ribose moiety in which the ribose moiety comprises an extra bridge connecting the 2′ and 4′ carbons. In other words, an LNA is a nucleotide comprising a bicyclic sugar moiety comprising a 4′-CH₂—O-2′ bridge. This structure effectively “locks” the ribose in the 3′-endo structural conformation. The addition of locked nucleic acids to siRNAs has been shown to increase siRNA stability in serum, and to reduce off-target effects (Elmen, J. et al., (2005) Nucleic Acids Research 33(1):439-447; Mook, O R. et al., (2007) Mol Canc Ther 6(3):833-843; Grunweller, A. et al., (2003) Nucleic Acids Research 31(12):3185-3193). Examples of bicyclic nucleosides for use in the polynucleotides of the invention include without limitation nucleosides comprising a bridge between the 4′ and the 2′ ribosyl ring atoms. In certain embodiments, the antisense polynucleotide agents of the invention include one or more bicyclic nucleosides comprising a 4′ to 2′ bridge.

[0217] A locked nucleoside can be represented by the structure (omitting stereochemistry),

[chemical structure]

[0218] wherein B is a nucleobase or modified nucleobase and L is the linking group that joins the 2′-carbon to the 4′-carbon of the ribose ring. Examples of such 4′ to 2′ bridged bicyclic nucleosides, include but are not limited to 4′-(CH₂)—O-2′ (LNA); 4′-(CH₂)—S-2′; 4′—(CH₂)₂—O-2′ (ENA); 4′-CH(CH₃)—O-2′ (also referred to as “constrained ethyl” or “cEt”) and 4′-CH(CH₂OCH₃)—O-2′ (and analogs thereof; see, e.g., U.S. Pat. No. 7,399,845); 4′-C(CH₃)(CH₃)—O-2′ (and analogs thereof; see e.g., U.S. Pat. No. 8,278,283); 4′-CH₂—N(OCH₃)-2′ (and analogs thereof; see e.g., U.S. Pat. No. 8,278,425); 4′-CH₂—O—N(CH₃)-2′ (see, e.g., U.S. Patent Publication No. 2004/0171570); 4′-CH₂—N(R)—O-2′, wherein R is H, C1-C12 alkyl, or a nitrogen protecting group (see, e.g., U.S. Pat. No. 7,427,672); 4′-CH₂—C(H)(CH₃)-2′ (see, e.g., Chattopadhyaya et al., J. Org. Chem., 2009, 74, 118-134); and 4′-CH₂—C(═CH₂)-2′ (and analogs thereof; see, e.g., U.S. Pat. No. 8,278,426). The entire contents of each of the foregoing are hereby incorporated herein by reference.

[0219] Additional representative U.S. patents and U.S. patent Publications that teach the preparation of locked nucleic acid nucleotides include, but are not limited to, the following: U.S. Pat. Nos. 6,268,490; 6,525,191; 6,670,461; 6,770,748; 6,794,499; 6,998,484; 7,053,207; 7,034,133; 7,084,125; 7,399,845; 7,427,672; 7,569,686; 7,741,457; 8,022,193; 8,030,467; 8,278,425; 8,278,426; 8,278,283; US 2008/0039618; and US 2009/0012281, the entire contents of each of which are hereby incorporated herein by reference.

[0220] Any of the foregoing bicyclic nucleosides can be prepared having one or more stereochemical sugar configurations including for example a-L-ribofuranose and P-D-ribofuranose (see WO 99/14226).

[0221] The RNA of an iRNA can also be modified to include one or more constrained ethyl nucleotides. As used herein, a “constrained ethyl nucleotide” or “cEt” is a locked nucleic acid comprising a bicyclic sugar moiety comprising a 4′-CH(CH₃)—O-2′ bridge (i.e., L in the preceding structure). In one embodiment, a constrained ethyl nucleotide is in the S conformation referred to herein as “S-cEt.”

[0222] An iRNA of the invention may also include one or more “conformationally restricted nucleotides” (“CRN”). CRN are nucleotide analogs with a linker connecting the C2′ and C4′ carbons of ribose or the C3 and —C5′ carbons of ribose. CRN lock the ribose ring into a stable conformation and increase the hybridization affinity to mRNA. The linker is of sufficient length to place the oxygen in an optimal position for stability and affinity resulting in less ribose ring puckering.

[0223] Representative publications that teach the preparation of certain of the above noted CRN include, but are not limited to, U.S. Patent Publication No. 2013/0190383; and PCT publication WO 2013/036868, the entire contents of each of which are hereby incorporated herein by reference.

[0224] In some embodiments, an iRNA of the invention comprises one or more monomers that are UNA (unlocked nucleic acid) nucleotides. UNA is unlocked acyclic nucleic acid, wherein any of the bonds of the sugar has been removed, forming an unlocked “sugar” residue. In one example, UNA also encompasses monomer with bonds between C1′-C4′ have been removed (i.e. the covalent carbon-oxygen-carbon bond between the C1′ and C4′ carbons). In another example, the C2′-C3′ bond (i.e. the covalent carbon-carbon bond between the C2′ and C3′ carbons) of the sugar has been removed (see Nuc. Acids Symp. Series, 52, 133-134 (2008) and Fluiter et al., Mol. Biosyst., 2009, 10, 1039 hereby incorporated by reference).

[0225] Representative U.S. publications that teach the preparation of UNA include, but are not limited to, U.S. Pat. No. 8,314,227; and U.S. Patent Publication Nos. 2013/0096289; 2013/0011922; and 2011/0313020, the entire contents of each of which are hereby incorporated herein by reference.

[0226] Potentially stabilizing modifications to the ends of RNA molecules can include N-(acetylaminocaproyl)-4-hydroxyprolinol (Hyp-C6-NHAc), N-(caproyl-4-hydroxyprolinol (Hyp-C6), N-(acetyl-4-hydroxyprolinol (Hyp-NHAc), thymidine-2′-0-deoxythymidine (ether), N-(aminocaproyl)-4-hydroxyprolinol (Hyp-C6-amino), 2-docosanoyl-uridine-3″-phosphate, inverted base dT(idT) and others. Disclosure of this modification can be found in PCT Publication No. WO 2011/005861.

[0227] Other modifications of the nucleotides of an iRNA of the invention include a 5′ phosphate or 5′ phosphate mimic, e.g., a 5′-terminal phosphate or phosphate mimic on the antisense strand of an iRNA. Suitable phosphate mimics are disclosed in, for example U.S. Patent Publication No. 2012/0157511, the entire contents of which are incorporated herein by reference.

A. Modified iRNAs Comprising Motifs of the Invention

[0228] In certain aspects of the invention, the double stranded RNA agents of the invention include agents with chemical modifications as disclosed, for example, in WO2013/075035, the entire contents of each of which are incorporated herein by reference. As shown herein and in WO2013/075035, one or more motifs of three identical modifications on three consecutive nucleotides may be introduced into a sense strand or antisense strand of a dsRNAi agent, particularly at or near the cleavage site. In some embodiments, the sense strand and antisense strand of the dsRNAi agent may otherwise be completely modified. The introduction of these motifs interrupts the modification pattern, if present, of the sense or antisense strand. The dsRNAi agent may be optionally conjugated with a GalNAc derivative ligand, for instance on the sense strand.

[0229] More specifically, when the sense strand and antisense strand of the double stranded RNA agent are completely modified to have one or more motifs of three identical modifications on three consecutive nucleotides at or near the cleavage site of at least one strand of a dsRNAi agent, the gene silencing activity of the dsRNAi agent was observed.

[0230] Accordingly, the invention provides double stranded RNA agents capable of inhibiting the expression of a target gene (i.e., CTNNB1 gene) in vivo. The RNAi agent comprises a sense strand and an antisense strand. Each strand of the RNAi agent may be, for example, 17-30 nucleotides in length, 25-30 nucleotides in length, 27-30 nucleotides in length, 19-25 nucleotides in length, 19-23 nucleotides in length, 19-21 nucleotides in length, 21-25 nucleotides in length, or 21-23 nucleotides in length.

[0231] The sense strand and antisense strand typically form a duplex double stranded RNA (“dsRNA”), also referred to herein as “dsRNAi agent.” The duplex region of a dsRNAi agent may be, for example, the duplex region can be 27-30 nucleotide pairs in length, 19-25 nucleotide pairs in length, 19-23 nucleotide pairs in length, 19-21 nucleotide pairs in length, 21-25 nucleotide pairs in length, or 21-23 nucleotide pairs in length. In another example, the duplex region is selected from 19, 20, 21, 22, 23, 24, 25, 26, and 27 nucleotides in length.

[0232] In certain embodiments, the dsRNAi agent may contain one or more overhang regions or capping groups at the 3′-end, 5′-end, or both ends of one or both strands. The overhang can be, independently, 1-6 nucleotides in length, for instance 2-6 nucleotides in length, 1-5 nucleotides in length, 2-5 nucleotides in length, 1-4 nucleotides in length, 2-4 nucleotides in length, 1-3 nucleotides in length, 2-3 nucleotides in length, or 1-2 nucleotides in length. In certain embodiments, the overhang regions can include extended overhang regions as provided above. The overhangs can be the result of one strand being longer than the other, or the result of two strands of the same length being staggered. The overhang can form a mismatch with the target mRNA or it can be complementary to the gene sequences being targeted or can be another sequence. The first and second strands can also be joined, e.g., by additional bases to form a hairpin, or by other non-base linkers.

[0233] In certain embodiments, the nucleotides in the overhang region of the dsRNAi agent can each independently be a modified or unmodified nucleotide including, but no limited to 2′-sugar modified, such as, 2′-F, 2′-O-methyl, thymidine (T), 2′-O-methoxyethyl-5-methyluridine (Teo), 2′-O-methoxyethyladenosine (Aeo), 2′-O-methoxyethyl-5-methylcytidine (m5Ceo), and any combinations thereof.

[0234] For example, TT can be an overhang sequence for either end on either strand. The overhang can form a mismatch with the target mRNA or it can be complementary to the gene sequences being targeted or can be another sequence.

[0235] The 5′- or 3′-overhangs at the sense strand, antisense strand, or both strands of the dsRNAi agent may be phosphorylated. In some embodiments, the overhang region(s) contains two nucleotides having a phosphorothioate between the two nucleotides, where the two nucleotides can be the same or different. In some embodiments, the overhang is present at the 3′-end of the sense strand, antisense strand, or both strands. In some embodiments, this 3′-overhang is present in the antisense strand. In some embodiments, this 3′-overhang is present in the sense strand.

[0236] The dsRNAi agent may contain only a single overhang, which can strengthen the interference activity of the RNAi, without affecting its overall stability. For example, the single-stranded overhang may be located at the 3′-end of the sense strand or, alternatively, at the 3′-end of the antisense strand. The RNAi may also have a blunt end, located at the 5′-end of the antisense strand (i.e., the 3′-end of the sense strand) or vice versa. Generally, the antisense strand of the dsRNAi agent has a nucleotide overhang at the 3′-end, and the 5′-end is blunt. While not wishing to be bound by theory, the asymmetric blunt end at the 5′-end of the antisense strand and 3′-end overhang of the antisense strand favor the guide strand loading into RISC process.

[0237] In certain embodiments, the dsRNAi agent is a double blunt-ended of 19 nucleotides in length, wherein the sense strand contains at least one motif of three 2′-F modifications on three consecutive nucleotides at positions 7, 8, 9 from the 5′end. The antisense strand contains at least one motif of three 2′-O-methyl modifications on three consecutive nucleotides at positions 11, 12, and 13 from the 5′end.

[0238] In other embodiments, the dsRNAi agent is a double blunt-ended of 20 nucleotides in length, wherein the sense strand contains at least one motif of three 2′-F modifications on three consecutive nucleotides at positions 8, 9, and 10 from the 5′end. The antisense strand contains at least one motif of three 2′-O-methyl modifications on three consecutive nucleotides at positions 11, 12, and 13 from the 5′end.

[0239] In yet other embodiments, the dsRNAi agent is a double blunt-ended of 21 nucleotides in length, wherein the sense strand contains at least one motif of three 2′-F modifications on three consecutive nucleotides at positions 9, 10, and 11 from the 5′end. The antisense strand contains at least one motif of three 2′-O-methyl modifications on three consecutive nucleotides at positions 11, 12, and 13 from the 5′end.

[0240] In certain embodiments, the dsRNAi agent comprises a 21 nucleotide sense strand and a 23 nucleotide antisense strand, wherein the sense strand contains at least one motif of three 2′-F modifications on three consecutive nucleotides at positions 9, 10, and 11 from the 5′end; the antisense strand contains at least one motif of three 2′-O-methyl modifications on three consecutive nucleotides at positions 11, 12, and 13 from the 5′end, wherein one end of the RNAi agent is blunt, while the other end comprises a 2 nucleotide overhang. In one embodiment, the 2 nucleotide overhang is at the 3′-end of the antisense strand.

[0241] When the 2 nucleotide overhang is at the 3′-end of the antisense strand, there may be two phosphorothioate internucleotide linkages between the terminal three nucleotides, wherein two of the three nucleotides are the overhang nucleotides, and the third nucleotide is a paired nucleotide next to the overhang nucleotide. In one embodiment, the RNAi agent additionally has two phosphorothioate internucleotide linkages between the terminal three nucleotides at both the 5′-end of the sense strand and at the 5′-end of the antisense strand. In certain embodiments, every nucleotide in the sense strand and the antisense strand of the dsRNAi agent, including the nucleotides that are part of the motifs are modified nucleotides. In certain embodiments each residue is independently modified with a 2′-O-methyl or 3′-fluoro, e.g., in an alternating motif. Optionally, the dsRNAi agent further comprises a ligand (such as, GalNAc₃).

[0242] In certain embodiments, the dsRNAi agent comprises a sense and an antisense strand, wherein the sense strand is 25-30 nucleotide residues in length, wherein starting from the 5′ terminal nucleotide (position 1) positions 1 to 23 of the first strand comprise at least 8 ribonucleotides; the antisense strand is 36-66 nucleotide residues in length and, starting from the 3′ terminal nucleotide, comprises at least 8 ribonucleotides in the positions paired with positions 1-23 of sense strand to form a duplex; wherein at least the 3 ′ terminal nucleotide of antisense strand is unpaired with sense strand, and up to 6 consecutive 3′ terminal nucleotides are unpaired with sense strand, thereby forming a 3′ single stranded overhang of 1-6 nucleotides; wherein the 5′ terminus of antisense strand comprises from 10-30 consecutive nucleotides which are unpaired with sense strand, thereby forming a 10-30 nucleotide single stranded 5′ overhang; wherein at least the sense strand 5′ terminal and 3′ terminal nucleotides are base paired with nucleotides of antisense strand when sense and antisense strands are aligned for maximum complementarity, thereby forming a substantially duplexed region between sense and antisense strands; and antisense strand is sufficiently complementary to a target RNA along at least 19 ribonucleotides of antisense strand length to reduce target gene expression when the double stranded nucleic acid is introduced into a mammalian cell; and wherein the sense strand contains at least one motif of three 2′-F modifications on three consecutive nucleotides, where at least one of the motifs occurs at or near the cleavage site. The antisense strand contains at least one motif of three 2′-O-methyl modifications on three consecutive nucleotides at or near the cleavage site.

[0243] In certain embodiments, the dsRNAi agent comprises sense and antisense strands, wherein the dsRNAi agent comprises a first strand having a length which is at least 25 and at most 29 nucleotides and a second strand having a length which is at most 30 nucleotides with at least one motif of three 2′-O-methyl modifications on three consecutive nucleotides at position 11, 12, 13 from the 5′ end; wherein the 3′ end of the first strand and the 5′ end of the second strand form a blunt end and the second strand is 1-4 nucleotides longer at its 3′ end than the first strand, wherein the duplex region which is at least 25 nucleotides in length, and the second strand is sufficiently complementary to a target mRNA along at least 19 nucleotide of the second strand length to reduce target gene expression when the RNAi agent is introduced into a mammalian cell, and wherein Dicer cleavage of the dsRNAi agent results in an siRNA comprising the 3′-end of the second strand, thereby reducing expression of the target gene in the mammal. Optionally, the dsRNAi agent further comprises a ligand.

[0244] In certain embodiments, the sense strand of the dsRNAi agent contains at least one motif of three identical modifications on three consecutive nucleotides, where one of the motifs occurs at the cleavage site in the sense strand.

[0245] In certain embodiments, the antisense strand of the dsRNAi agent can also contain at least one motif of three identical modifications on three consecutive nucleotides, where one of the motifs occurs at or near the cleavage site in the antisense strand.

[0246] For a dsRNAi agent having a duplex region of 19-23 nucleotides in length, the cleavage site of the antisense strand is typically around the 10, 11, and 12 positions from the 5′-end. Thus the motifs of three identical modifications may occur at the 9, 10, 11 positions; the 10, 11, 12 positions; the 11, 12, 13 positions; the 12, 13, 14 positions; or the 13, 14, 15 positions of the antisense strand, the count starting from the first nucleotide from the 5′-end of the antisense strand, or, the count starting from the first paired nucleotide within the duplex region from the 5′-end of the antisense strand. The cleavage site in the antisense strand may also change according to the length of the duplex region of the dsRNAi agent from the 5′-end.

[0247] The sense strand of the dsRNAi agent may contain at least one motif of three identical modifications on three consecutive nucleotides at the cleavage site of the strand; and the antisense strand may have at least one motif of three identical modifications on three consecutive nucleotides at or near the cleavage site of the strand. When the sense strand and the antisense strand form a dsRNA duplex, the sense strand and the antisense strand can be so aligned that one motif of the three nucleotides on the sense strand and one motif of the three nucleotides on the antisense strand have at least one nucleotide overlap, i.e., at least one of the three nucleotides of the motif in the sense strand forms a base pair with at least one of the three nucleotides of the motif in the antisense strand. Alternatively, at least two nucleotides may overlap, or all three nucleotides may overlap.

[0248] In some embodiments, the sense strand of the dsRNAi agent may contain more than one motif of three identical modifications on three consecutive nucleotides. The first motif may occur at or near the cleavage site of the strand and the other motifs may be a wing modification. The term “wing modification” herein refers to a motif occurring at another portion of the strand that is separated from the motif at or near the cleavage site of the same strand. The wing modification is either adjacent to the first motif or is separated by at least one or more nucleotides. When the motifs are immediately adjacent to each other then the chemistries of the motifs are distinct from each other, and when the motifs are separated by one or more nucleotide than the chemistries can be the same or different. Two or more wing modifications may be present. For instance, when two wing modifications are present, each wing modification may occur at one end relative to the first motif which is at or near cleavage site or on either side of the lead motif.

[0249] Like the sense strand, the antisense strand of the dsRNAi agent may contain more than one motif of three identical modifications on three consecutive nucleotides, with at least one of the motifs occurring at or near the cleavage site of the strand. This antisense strand may also contain one or more wing modifications in an alignment similar to the wing modifications that may be present on the sense strand.

[0250] In some embodiments, the wing modification on the sense strand or antisense strand of the dsRNAi agent typically does not include the first one or two terminal nucleotides at the 3′-end, 5′-end, or both ends of the strand.

[0251] In other embodiments, the wing modification on the sense strand or antisense strand of the dsRNAi agent typically does not include the first one or two paired nucleotides within the duplex region at the 3′-end, 5′-end, or both ends of the strand.

[0252] When the sense strand and the antisense strand of the dsRNAi agent each contain at least one wing modification, the wing modifications may fall on the same end of the duplex region, and have an overlap of one, two, or three nucleotides.

[0253] When the sense strand and the antisense strand of the dsRNAi agent each contain at least two wing modifications, the sense strand and the antisense strand can be so aligned that two modifications each from one strand fall on one end of the duplex region, having an overlap of one, two, or three nucleotides; two modifications each from one strand fall on the other end of the duplex region, having an overlap of one, two or three nucleotides; two modifications one strand fall on each side of the lead motif, having an overlap of one, two or three nucleotides in the duplex region.

[0254] In some embodiments, every nucleotide in the sense strand and antisense strand of the dsRNAi agent, including the nucleotides that are part of the motifs, may be modified. Each nucleotide may be modified with the same or different modification which can include one or more alteration of one or both of the non-linking phosphate oxygens or of one or more of the linking phosphate oxygens; alteration of a constituent of the ribose sugar, e.g., of the 2′-hydroxyl on the ribose sugar; wholesale replacement of the phosphate moiety with “dephospho” linkers; modification or replacement of a naturally occurring base; and replacement or modification of the ribose-phosphate backbone.

[0255] As nucleic acids are polymers of subunits, many of the modifications occur at a position which is repeated within a nucleic acid, e.g., a modification of a base, or a phosphate moiety, or a non-linking O of a phosphate moiety. In some cases the modification will occur at all of the subject positions in the nucleic acid but in many cases it will not. By way of example, a modification may only occur at a 3′- or 5′ terminal position, may only occur in a terminal region, e.g., at a position on a terminal nucleotide or in the last 2, 3, 4, 5, or 10 nucleotides of a strand. A modification may occur in a double strand region, a single strand region, or in both. A modification may occur only in the double strand region of an RNA or may only occur in a single strand region of a RNA. For example, a phosphorothioate modification at a non-linking O position may only occur at one or both termini, may only occur in a terminal region, e.g., at a position on a terminal nucleotide or in the last 2, 3, 4, 5, or 10 nucleotides of a strand, or may occur in double strand and single strand regions, particularly at termini. The 5′-end or ends can be phosphorylated.

[0256] It may be possible, e.g., to enhance stability, to include particular bases in overhangs, or to include modified nucleotides or nucleotide surrogates, in single strand overhangs, e.g., in a 5′- or 3′-overhang, or in both. For example, it can be desirable to include purine nucleotides in overhangs. In some embodiments all or some of the bases in a 3′- or 5′-overhang may be modified, e.g., with a modification described herein. Modifications can include, e.g., the use of modifications at the 2′ position of the ribose sugar with modifications that are known in the art, e.g., the use of deoxyribonucleotides, 2′-deoxy-2′-fluoro (2′-F) or 2′-O-methyl modified instead of the ribosugar of the nucleobase, and modifications in the phosphate group, e.g., phosphorothioate modifications. Overhangs need not be homologous with the target sequence.

[0257] In some embodiments, each residue of the sense strand and antisense strand is independently modified with LNA, CRN, cET, UNA, HNA, CeNA, 2′-methoxyethyl, 2′-O-methyl, 2′-O-allyl, 2′-C-allyl, 2′-deoxy, 2′-hydroxyl, or 2′-fluoro. The strands can contain more than one modification. In one embodiment, each residue of the sense strand and antisense strand is independently modified with 2′-O-methyl or 2′-fluoro.

[0258] At least two different modifications are typically present on the sense strand and antisense strand. Those two modifications may be the 2′-O-methyl or 2′-fluoro modifications, or others.

[0259] In certain embodiments, the Nₐ or N_{b} comprise modifications of an alternating pattern. The term “alternating motif” as used herein refers to a motif having one or more modifications, each modification occurring on alternating nucleotides of one strand. The alternating nucleotide may refer to one per every other nucleotide or one per every three nucleotides, or a similar pattern. For example, if A, B and C each represent one type of modification to the nucleotide, the alternating motif can be “ABABABABABAB . . . ,” “AABBAABBAABB . . . ,” “AABAABAABAAB . . . ,” “AAABAAABAAAB . . . ,” “AAABBBAAABBB . . . ,” or “ABCABCABCABC . . . ,” etc.

[0260] The type of modifications contained in the alternating motif may be the same or different. For example, if A, B, C, D each represent one type of modification on the nucleotide, the alternating pattern, i.e., modifications on every other nucleotide, may be the same, but each of the sense strand or antisense strand can be selected from several possibilities of modifications within the alternating motif such as “ABABAB . . . ”, “ACACAC . . . ” “BDBDBD . . . ” or “CDCDCD . . . ,” etc.

[0261] In some embodiments, the dsRNAi agent of the invention comprises the modification pattern for the alternating motif on the sense strand relative to the modification pattern for the alternating motif on the antisense strand is shifted. The shift may be such that the modified group of nucleotides of the sense strand corresponds to a differently modified group of nucleotides of the antisense strand and vice versa. For example, the sense strand when paired with the antisense strand in the dsRNA duplex, the alternating motif in the sense strand may start with “ABABAB” from 5′ to 3′ of the strand and the alternating motif in the antisense strand may start with “BABABA” from 5′ to 3′ of the strand within the duplex region. As another example, the alternating motif in the sense strand may start with “AABBAABB” from 5′ to 3′ of the strand and the alternating motif in the antisense strand may start with “BBAABBAA” from 5′ to 3′ of the strand within the duplex region, so that there is a complete or partial shift of the modification patterns between the sense strand and the antisense strand.

[0262] In some embodiments, the dsRNAi agent comprises the pattern of the alternating motif of 2′-O-methyl modification and 2′-F modification on the sense strand initially has a shift relative to the pattern of the alternating motif of 2′-O-methyl modification and 2′-F modification on the antisense strand initially, i.e., the 2′-O-methyl modified nucleotide on the sense strand base pairs with a 2′-F modified nucleotide on the antisense strand and vice versa. The 1 position of the sense strand may start with the 2′-F modification, and the 1 position of the antisense strand may start with the 2′-O-methyl modification.

[0263] The introduction of one or more motifs of three identical modifications on three consecutive nucleotides to the sense strand or antisense strand interrupts the initial modification pattern present in the sense strand or antisense strand. This interruption of the modification pattern of the sense or antisense strand by introducing one or more motifs of three identical modifications on three consecutive nucleotides to the sense or antisense strand may enhance the gene silencing activity against the target gene.

[0264] In some embodiments, when the motif of three identical modifications on three consecutive nucleotides is introduced to any of the strands, the modification of the nucleotide next to the motif is a different modification than the modification of the motif. For example, the portion of the sequence containing the motif is “ . . . NₐYYYN_{b} . . . ,” where “Y” represents the modification of the motif of three identical modifications on three consecutive nucleotide, and “Nₐ” and “N_{b}” represent a modification to the nucleotide next to the motif “YYY” that is different than the modification of Y, and where Nₐ and N_{b} can be the same or different modifications. Alternatively, Nₐ or N_{b} may be present or absent when there is a wing modification present.

[0265] The iRNA may further comprise at least one phosphorothioate or methylphosphonate internucleotide linkage. The phosphorothioate or methylphosphonate internucleotide linkage modification may occur on any nucleotide of the sense strand, antisense strand, or both strands in any position of the strand. For instance, the internucleotide linkage modification may occur on every nucleotide on the sense strand or antisense strand; each internucleotide linkage modification may occur in an alternating pattern on the sense strand or antisense strand; or the sense strand or antisense strand may contain both internucleotide linkage modifications in an alternating pattern. The alternating pattern of the internucleotide linkage modification on the sense strand may be the same or different from the antisense strand, and the alternating pattern of the internucleotide linkage modification on the sense strand may have a shift relative to the alternating pattern of the internucleotide linkage modification on the antisense strand. In one embodiment, a double-stranded RNAi agent comprises 6-8 phosphorothioate internucleotide linkages. In some embodiments, the antisense strand comprises two phosphorothioate internucleotide linkages at the 5′-end and two phosphorothioate internucleotide linkages at the 3′-end, and the sense strand comprises at least two phosphorothioate internucleotide linkages at either the 5′-end or the 3′-end.

[0266] In some embodiments, the dsRNAi agent comprises a phosphorothioate or methylphosphonate internucleotide linkage modification in the overhang region. For example, the overhang region may contain two nucleotides having a phosphorothioate or methylphosphonate internucleotide linkage between the two nucleotides. Internucleotide linkage modifications also may be made to link the overhang nucleotides with the terminal paired nucleotides within the duplex region. For example, at least 2, 3, 4, or all the overhang nucleotides may be linked through phosphorothioate or methylphosphonate internucleotide linkage, and optionally, there may be additional phosphorothioate or methylphosphonate internucleotide linkages linking the overhang nucleotide with a paired nucleotide that is next to the overhang nucleotide. For instance, there may be at least two phosphorothioate internucleotide linkages between the terminal three nucleotides, in which two of the three nucleotides are overhang nucleotides, and the third is a paired nucleotide next to the overhang nucleotide. These terminal three nucleotides may be at the 3′-end of the antisense strand, the 3′-end of the sense strand, the 5′-end of the antisense strand, or the 5′end of the antisense strand.

[0267] In some embodiments, the 2-nucleotide overhang is at the 3′-end of the antisense strand, and there are two phosphorothioate internucleotide linkages between the terminal three nucleotides, wherein two of the three nucleotides are the overhang nucleotides, and the third nucleotide is a paired nucleotide next to the overhang nucleotide. Optionally, the dsRNAi agent may additionally have two phosphorothioate internucleotide linkages between the terminal three nucleotides at both the 5′-end of the sense strand and at the 5′-end of the antisense strand.

[0268] In one embodiment, the dsRNAi agent comprises mismatch(es) with the target, within the duplex, or combinations thereof. The mismatch may occur in the overhang region or the duplex region. The base pair may be ranked on the basis of their propensity to promote dissociation or melting (e.g., on the free energy of association or dissociation of a particular pairing, the simplest approach is to examine the pairs on an individual pair basis, though next neighbor or similar analysis can also be used). In terms of promoting dissociation: A:U is preferred over G:C; G:U is preferred over G:C; and I:C is preferred over G:C (I=inosine). Mismatches, e.g., non-canonical or other than canonical pairings (as described elsewhere herein) are preferred over canonical (A:T, A:U, G:C) pairings; and pairings which include a universal base are preferred over canonical pairings.

[0269] In certain embodiments, the dsRNAi agent comprises at least one of the first 1, 2, 3, 4, or 5 base pairs within the duplex regions from the 5′-end of the antisense strand independently selected from the group of A:U, G:U, I:C, and mismatched pairs, e.g., non-canonical or other than canonical pairings or pairings which include a universal base, to promote the dissociation of the antisense strand at the 5′-end of the duplex.

[0270] In certain embodiments, the nucleotide at the 1 position within the duplex region from the 5′-end in the antisense strand is selected from A, dA, dU, U, and dT. Alternatively, at least one of the first 1, 2, or 3 base pair within the duplex region from the 5′-end of the antisense strand is an AU base pair. For example, the first base pair within the duplex region from the 5′-end of the antisense strand is an AU base pair.

[0271] In other embodiments, the nucleotide at the 3′-end of the sense strand is deoxythimidine (dT) or the nucleotide at the 3′-end of the antisense strand is deoxythimidine (dT). For example, there is a short sequence of deoxythimidine nucleotides, for example, two dT nucleotides on the 3′-end of the sense, antisense strand, or both strands.

[0272] In certain embodiments, the sense strand sequence may be represented by formula (I):

[chemical structure]

[0273] wherein:
[0274] i and j are each independently 0 or 1;
[0275] p and q are each independently 0-6;
[0276] each Nₐ independently represents an oligonucleotide sequence comprising 0-25 modified nucleotides, each sequence comprising at least two differently modified nucleotides;
[0277] each N_{b} independently represents an oligonucleotide sequence comprising 0-10 modified nucleotides;
[0278] each nₚ and n_{q} independently represent an overhang nucleotide;
[0279] wherein Nb and Y do not have the same modification; and
[0280] XXX, YYY, and ZZZ each independently represent one motif of three identical modifications on three consecutive nucleotides. In one embodiment, YYY is all 2′-F modified nucleotides.

[0281] In some embodiments, the Nₐ or N_{b} comprises modifications of alternating pattern.

[0282] In some embodiments, the YYY motif occurs at or near the cleavage site of the sense strand. For example, when the dsRNAi agent has a duplex region of 17-23 nucleotides in length, the YYY motif can occur at or the vicinity of the cleavage site (e.g.: can occur at positions 6, 7, 8; 7, 8, 9; 8, 9, 10; 9, 10, 11; 10, 11,12; or 11, 12, 13) of the sense strand, the count starting from the first nucleotide, from the 5′-end; or optionally, the count starting at the first paired nucleotide within the duplex region, from the 5′-end.

[0283] In one embodiment, i is 1 and j is 0, or i is 0 and j is 1, or both i and j are 1. The sense strand can therefore be represented by the following formulas:

[chemical structure]

[0284] When the sense strand is represented by formula (Ib), N_{b} represents an oligonucleotide sequence comprising 0-10, 0-7, 0-5, 0-4, 0-2, or 0 modified nucleotides. Each Nₐ independently can represent an oligonucleotide sequence comprising 2-20, 2-15, or 2-10 modified nucleotides.

[0285] When the sense strand is represented as formula (Ic), N_{b} represents an oligonucleotide sequence comprising 0-10, 0-7, 0-10, 0-7, 0-5, 0-4, 0-2, or 0 modified nucleotides. Each Nₐ can independently represent an oligonucleotide sequence comprising 2-20, 2-15, or 2-10 modified nucleotides.

[0286] When the sense strand is represented as formula (Id), each N_{b} independently represents an oligonucleotide sequence comprising 0-10, 0-7, 0-5, 0-4, 0-2, or 0 modified nucleotides. In one embodiment, N_{b} is 0, 1, 2, 3, 4, 5, or 6 Each Nₐ can independently represent an oligonucleotide sequence comprising 2-20, 2-15, or 2-10 modified nucleotides.

[0287] Each of X, Y and Z may be the same or different from each other.

[0288] In other embodiments, i is 0 and j is 0, and the sense strand may be represented by the formula:

[chemical structure]

[0289] When the sense strand is represented by formula (Ia), each Nₐ independently can represent an oligonucleotide sequence comprising 2-20, 2-15, or 2-10 modified nucleotides.

[0290] In one embodiment, the antisense strand sequence of the RNAi may be represented by formula (II):

[chemical structure]

[0291] wherein:
[0292] k and 1 are each independently 0 or 1;
[0293] p′ and q′ are each independently 0-6;
[0294] each Nₐ′ independently represents an oligonucleotide sequence comprising 0-25 modified nucleotides, each sequence comprising at least two differently modified nucleotides; each N_{b}′ independently represents an oligonucleotide sequence comprising 0-10 modified nucleotides;
[0295] each nₚ′ and n_{q}′ independently represent an overhang nucleotide;
[0296] wherein N_{b}‘ and Y’ do not have the same modification; and
[0297] X′X′X′, Y′Y′Y′, and Z′Z′Z′ each independently represent one motif of three identical modifications on three consecutive nucleotides.

[0298] In some embodiments, the Nₐ′ or N_{b}′ comprises modifications of alternating pattern.

[0299] The Y′Y′Y′ motif occurs at or near the cleavage site of the antisense strand. For example, when the dsRNAi agent has a duplex region of 17-23 nucleotides in length, the Y′Y′Y′ motif can occur at positions 9, 10, 11; 10, 11, 12; 11, 12, 13; 12, 13, 14; or 13, 14, 15 of the antisense strand, with the count starting from the first nucleotide, from the 5′-end; or optionally, the count starting at the first paired nucleotide within the duplex region, from the 5′-end. In one embodiment, the Y′Y′Y′ motif occurs at positions 11, 12, 13.

[0300] In certain embodiments, Y′Y′Y′ motif is all 2′-OMe modified nucleotides.

[0301] In certain embodiments, k is 1 and 1 is 0, or k is 0 and 1 is 1, or both k and 1 are 1.

[0302] The antisense strand can therefore be represented by the following formulas:

[chemical structure]

[0303] When the antisense strand is represented by formula (IIb), N_{b} represents an oligonucleotide sequence comprising 0-10, 0-7, 0-10, 0-7, 0-5, 0-4, 0-2, or 0 modified nucleotides. Each Nₐ′ independently represents an oligonucleotide sequence comprising 2-20, 2-15, or 2-10 modified nucleotides.

[0304] When the antisense strand is represented as formula (IIc), N_{b}′ represents an oligonucleotide sequence comprising 0-10, 0-7, 0-10, 0-7, 0-5, 0-4, 0-2, or 0 modified nucleotides. Each Nₐ′ independently represents an oligonucleotide sequence comprising 2-20, 2-15, or 2-10 modified nucleotides.

[0305] When the antisense strand is represented as formula (IId), each N_{b}′ independently represents an oligonucleotide sequence comprising 0-10, 0-7, 0-10, 0-7, 0-5, 0-4, 0-2, or 0 modified nucleotides. Each Nₐ′ independently represents an oligonucleotide sequence comprising 2-20, 2-15, or 2-10 modified nucleotides. In one embodiment, N_{b} is 0, 1, 2, 3, 4, 5, or 6.

[0306] In other embodiments, k is 0 and 1 is 0 and the antisense strand may be represented by the formula:

[chemical structure]

[0307] When the antisense strand is represented as formula (IIa), each Nₐ′ independently represents an oligonucleotide sequence comprising 2-20, 2-15, or 2-10 modified nucleotides.

Each of X′, Y′ and Z′ may be the same or different from each other.

[0308] Each nucleotide of the sense strand and antisense strand may be independently modified with LNA, CRN, UNA, cEt, HNA, CeNA, 2′-methoxyethyl, 2′-O-methyl, 2′-O-allyl, 2′-C-allyl, 2′-hydroxyl, or 2′-fluoro. For example, each nucleotide of the sense strand and antisense strand is independently modified with 2′-O-methyl or 2′-fluoro. Each X, Y, Z, X′ Y′, and Z′, in particular, may represent a 2′-O-methyl modification or a 2′-fluoro modification.

[0309] In some embodiments, the sense strand of the dsRNAi agent may contain YYY motif occurring at 9, 10, and 11 positions of the strand when the duplex region is 21 nt, the count starting from the first nucleotide from the 5′-end, or optionally, the count starting at the first paired nucleotide within the duplex region, from the 5′-end; and Y represents 2′-F modification. The sense strand may additionally contain XXX motif or ZZZ motifs as wing modifications at the opposite end of the duplex region; and XXX and ZZZ each independently represents a 2′-OMe modification or 2′-F modification.

[0310] In some embodiments the antisense strand may contain Y′Y′Y′ motif occurring at positions 11, 12, 13 of the strand, the count starting from the first nucleotide from the 5′-end, or optionally, the count starting at the first paired nucleotide within the duplex region, from the 5′-end; and Y′ represents 2′-O-methyl modification. The antisense strand may additionally contain X′X′X′ motif or Z′Z′Z′ motifs as wing modifications at the opposite end of the duplex region; and X′X′X′ and Z′Z′Z′ each independently represents a 2′-OMe modification or 2′-F modification.

[0311] The sense strand represented by any one of the above formulas (Ia), (Ib), (Ic), and (Id) forms a duplex with an antisense strand being represented by any one of formulas (IIa), (IIb), (IIc), and (IId), respectively.

[0312] Accordingly, the dsRNAi agents for use in the methods of the invention may comprise a sense strand and an antisense strand, each strand having 14 to 30 nucleotides, the iRNA duplex represented by formula (III):

[chemical structure]

[0313] wherein:
[0314] i, j, k, and 1 are each independently 0 or 1;
[0315] p, p′, q, and q′ are each independently 0-6;
[0316] each Nₐ and Nₐ′ independently represents an oligonucleotide sequence comprising 0-25 modified nucleotides, each sequence comprising at least two differently modified nucleotides;
[0317] each N_{b} and N_{b}′ independently represents an oligonucleotide sequence comprising 0-10 modified nucleotides;
[0318] wherein each nₚ′, np, n_{q}′, and n_{q}, each of which may or may not be present, independently represents an overhang nucleotide; and
[0319] XXX, YYY, ZZZ, X′X′X′, Y′Y′Y′, and Z′Z′Z′ each independently represent one motif of three identical modifications on three consecutive nucleotides.

[0320] In one embodiment, i is 0 and j is 0; or i is 1 and j is 0; or i is 0 and j is 1; or both i and j are 0; or both i and j are 1. In another embodiment, k is 0 and 1 is 0; or k is 1 and 1 is 0; k is 0 and 1 is 1; or both k and 1 are 0; or both k and 1 are 1.

[0321] Exemplary combinations of the sense strand and antisense strand forming an iRNA duplex include the formulas below:

[chemical structure]

[0322] When the dsRNAi agent is represented by formula (IIIa), each Nₐ independently represents an oligonucleotide sequence comprising 2-20, 2-15, or 2-10 modified nucleotides.

[0323] When the dsRNAi agent is represented by formula (IIIb), each N_{b} independently represents an oligonucleotide sequence comprising 1-10, 1-7, 1-5, or 1-4 modified nucleotides. Each Nₐindependently represents an oligonucleotide sequence comprising 2-20, 2-15, or 2-10 modified nucleotides.

[0324] When the dsRNAi agent is represented as formula (IIIc), each N_{b}, N_{b}′ independently represents an oligonucleotide sequence comprising 0-10, 0-7, 0-10, 0-7, 0-5, 0-4, 0-2, or 0 modified nucleotides. Each Nₐ independently represents an oligonucleotide sequence comprising 2-20, 2-15, or 2-10 modified nucleotides.

[0325] When the dsRNAi agent is represented as formula (IIId), each N_{b}, N_{b}′ independently represents an oligonucleotide sequence comprising 0-10, 0-7, 0-10, 0-7, 0-5, 0-4, 0-2, or 0 modified nucleotides. Each Nₐ, Nₐ′ independently represents an oligonucleotide sequence comprising 2-20, 2-15, or 2-10 modified nucleotides. Each of Nₐ, Nₐ′, N_{b}, and N_{b}′ independently comprises modifications of alternating pattern.

[0326] Each of X, Y, and Z in formulas (III), (IIIa), (IIIb), (IIIc), and (IIId) may be the same or different from each other.

[0327] When the dsRNAi agent is represented by formula (III), (IIIa), (IIIb), (IIIc), and (IIId), at least one of the Y nucleotides may form a base pair with one of the Y′ nucleotides. Alternatively, at least two of the Y nucleotides form base pairs with the corresponding Y′ nucleotides; or all three of the Y nucleotides all form base pairs with the corresponding Y′ nucleotides.

[0328] When the dsRNAi agent is represented by formula (IIIb) or (IIId), at least one of the Z nucleotides may form a base pair with one of the Z′ nucleotides. Alternatively, at least two of the Z nucleotides form base pairs with the corresponding Z′ nucleotides; or all three of the Z nucleotides all form base pairs with the corresponding Z′ nucleotides.

[0329] When the dsRNAi agent is represented as formula (IIIc) or (IIId), at least one of the X nucleotides may form a base pair with one of the X′ nucleotides. Alternatively, at least two of the X nucleotides form base pairs with the corresponding X′ nucleotides; or all three of the X nucleotides all form base pairs with the corresponding X′ nucleotides.

[0330] In certain embodiments, the modification on the Y nucleotide is different than the modification on the Y′ nucleotide, the modification on the Z nucleotide is different than the modification on the Z′ nucleotide, or the modification on the X nucleotide is different than the modification on the X′ nucleotide.

[0331] In certain embodiments, when the dsRNAi agent is represented by formula (IIId), the Nₐmodifications are 2′-O-methyl or 2′-fluoro modifications. In other embodiments, when the RNAi agent is represented by formula (IIId), the Nₐ modifications are 2′-O-methyl or 2′-fluoro modifications and nₚ′>0 and at least one nₚ′ is linked to a neighboring nucleotide a via phosphorothioate linkage. In yet other embodiments, when the RNAi agent is represented by formula (IIId), the Nₐ modifications are 2′-O-methyl or 2′-fluoro modifications, nₚ′>0 and at least one nₚ′ is linked to a neighboring nucleotide via phosphorothioate linkage, and the sense strand is conjugated to one or more GalNAc derivatives attached through a bivalent or trivalent branched linker (described below). In other embodiments, when the RNAi agent is represented by formula (IIId), the Nₐ modifications are 2′-O-methyl or 2′-fluoro modifications, nₚ′>0 and at least one nₚ′ is linked to a neighboring nucleotide via phosphorothioate linkage, the sense strand comprises at least one phosphorothioate linkage, and the sense strand is conjugated to one or more GalNAc derivatives attached through a bivalent or trivalent branched linker.

[0332] In some embodiments, when the dsRNAi agent is represented by formula (IIIa), the Nₐmodifications are 2′-O-methyl or 2′-fluoro modifications, nₚ′>0 and at least one nₚ′ is linked to a neighboring nucleotide via phosphorothioate linkage, the sense strand comprises at least one phosphorothioate linkage, and the sense strand is conjugated to one or more GalNAc derivatives attached through a bivalent or trivalent branched linker.

[0333] In some embodiments, the dsRNAi agent is a multimer containing at least two duplexes represented by formula (III), (IIIa), (IIIb), (IIIc), and (IIId), wherein the duplexes are connected by a linker. The linker can be cleavable or non-cleavable. Optionally, the multimer further comprises a ligand. Each of the duplexes can target the same gene or two different genes; or each of the duplexes can target same gene at two different target sites.

[0334] In some embodiments, the dsRNAi agent is a multimer containing three, four, five, six, or more duplexes represented by formula (III), (IIIa), (IIIb), (IIIc), and (IIId), wherein the duplexes are connected by a linker. The linker can be cleavable or non-cleavable. Optionally, the multimer further comprises a ligand. Each of the duplexes can target the same gene or two different genes; or each of the duplexes can target same gene at two different target sites.

[0335] In one embodiment, two dsRNAi agents represented by at least one of formulas (III), (IIIa), (IIIb), (IIIc), and (IIId) are linked to each other at the 5′ end, and one or both of the 3′ ends, and are optionally conjugated to a ligand. Each of the agents can target the same gene or two different genes; or each of the agents can target same gene at two different target sites.

[0336] In certain embodiments, an RNAi agent of the invention may contain a low number of nucleotides containing a 2′-fluoro modification, e.g., 10 or fewer nucleotides with 2′-fluoro modification. For example, the RNAi agent may contain 10, 9, 8, 7, 6, 5, 4, 3, 2, 1 or 0 nucleotides with a 2′-fluoro modification. In a specific embodiment, the RNAi agent of the invention contains 10 nucleotides with a 2′-fluoro modification, e.g., 4 nucleotides with a 2′-fluoro modification in the sense strand and 6 nucleotides with a 2′-fluoro modification in the antisense strand. In another specific embodiment, the RNAi agent of the invention contains 6 nucleotides with a 2′-fluoro modification, e.g., 4 nucleotides with a 2′-fluoro modification in the sense strand and 2 nucleotides with a 2′-fluoro modification in the antisense strand.

[0337] In other embodiments, an RNAi agent of the invention may contain an ultra low number of nucleotides containing a 2′-fluoro modification, e.g., 2 or fewer nucleotides containing a 2′-fluoro modification. For example, the RNAi agent may contain 2, 1 of 0 nucleotides with a 2′-fluoro modification. In a specific embodiment, the RNAi agent may contain 2 nucleotides with a 2′-fluoro modification, e.g., 0 nucleotides with a 2-fluoro modification in the sense strand and 2 nucleotides with a 2′-fluoro modification in the antisense strand.

[0338] Various publications describe multimeric iRNAs that can be used in the methods of the invention. Such publications include WO2007/091269, U.S. Pat. No. 7,858,769, WO2010/141511, WO2007/117686, WO2009/014887, and WO2011/031520 the entire contents of each of which are hereby incorporated herein by reference.

[0339] In certain embodiments, the compositions and methods of the disclosure include a vinyl phosphonate (VP) modification of an RNAi agent as described herein. In exemplary embodiments, a 5′ vinyl phosphonate modified nucleotide of the disclosure has the structure:

[chemical structure]

wherein X is 0 or S;
[0340] R is hydrogen, hydroxy, fluoro, or C₁₋₂₀alkoxy (e.g., methoxy or n-hexadecyloxy);
[0341] R^{5′} is ═C(H)—P(O)(OH)₂ and the double bond between the C5′ carbon and R″ is in the E or Z orientation (e.g., E orientation); and
[0342] B is a nucleobase or a modified nucleobase, optionally where B is adenine, guanine, cytosine, thymine, or uracil.

[0343] A vinyl phosphonate of the instant disclosure may be attached to either the antisense or the sense strand of a dsRNA of the disclosure. In certain embodiments, a vinyl phosphonate of the instant disclosure is attached to the antisense strand of a dsRNA, optionally at the 5′ end of the antisense strand of the dsRNA.

[0344] Vinyl phosphonate modifications are also contemplated for the compositions and methods of the instant disclosure. An exemplary vinyl phosphonate structure includes the preceding structure, where R5′ is ═C(H)—OP(O)(OH)2 and the double bond between the C5′ carbon and R5′ is in the E or Z orientation (e.g., E orientation).

[0345] As described in more detail below, the iRNA that contains conjugations of one or more carbohydrate moieties to an iRNA can optimize one or more properties of the iRNA. In many cases, the carbohydrate moiety will be attached to a modified subunit of the iRNA. For example, the ribose sugar of one or more ribonucleotide subunits of a iRNA can be replaced with another moiety, e.g., a non-carbohydrate (such as, cyclic) carrier to which is attached a carbohydrate ligand. A ribonucleotide subunit in which the ribose sugar of the subunit has been so replaced is referred to herein as a ribose replacement modification subunit (RRMS). A cyclic carrier may be a carbocyclic ring system, i.e., all ring atoms are carbon atoms, or a heterocyclic ring system, i.e., one or more ring atoms may be a heteroatom, e.g., nitrogen, oxygen, sulfur. The cyclic carrier may be a monocyclic ring system, or may contain two or more rings, e.g. fused rings. The cyclic carrier may be a fully saturated ring system, or it may contain one or more double bonds.

[0346] The ligand may be attached to the polynucleotide via a carrier. The carriers include (i) at least one “backbone attachment point,” such as, two “backbone attachment points” and (ii) at least one “tethering attachment point.” A “backbone attachment point” as used herein refers to a functional group, e.g. a hydroxyl group, or generally, a bond available for, and that is suitable for incorporation of the carrier into the backbone, e.g., the phosphate, or modified phosphate, e.g., sulfur containing, backbone, of a ribonucleic acid. A “tethering attachment point” (TAP) in some embodiments refers to a constituent ring atom of the cyclic carrier, e.g., a carbon atom or a heteroatom (distinct from an atom which provides a backbone attachment point), that connects a selected moiety. The moiety can be, e.g., a carbohydrate, e.g. monosaccharide, disaccharide, trisaccharide, tetrasaccharide, oligosaccharide, or polysaccharide. Optionally, the selected moiety is connected by an intervening tether to the cyclic carrier. Thus, the cyclic carrier will often include a functional group, e.g., an amino group, or generally, provide a bond, that is suitable for incorporation or tethering of another chemical entity, e.g., a ligand to the constituent ring.

[0347] The iRNA may be conjugated to a ligand via a carrier, wherein the carrier can be cyclic group or acyclic group. In one embodiment, the cyclic group is selected from pyrrolidinyl, pyrazolinyl, pyrazolidinyl, imidazolinyl, imidazolidinyl, piperidinyl, piperazinyl, [1,3]dioxolane, oxazolidinyl, isoxazolidinyl, morpholinyl, thiazolidinyl, isothiazolidinyl, quinoxalinyl, pyridazinonyl, tetrahydrofuryl, and decalin. In one embodiment, the acyclic group is a serinol backbone or diethanolamine backbone.PCT/US12/068491,

i. Thermally Destabilizing Modifications

[0348] In certain embodiments, a dsRNA molecule can be optimized for RNA interference by incorporating thermally destabilizing modifications in the seed region of the antisense strand. As used herein “seed region” means at positions 2-9 of the 5′-end of the referenced strand or at positions 2-8 of the 5′-end of the referenced strand. For example, thermally destabilizing modifications can be incorporated in the seed region of the antisense strand to reduce or inhibit off-target gene silencing.

[0349] The term “thermally destabilizing modification(s)” includes modification(s) that would result with a dsRNA with a lower overall melting temperature (Tₘ) than the Tₘ of the dsRNA without having such modification(s). For example, the thermally destabilizing modification(s) can decrease the Tₘ of the dsRNA by 1-4° C., such as one, two, three or four degrees Celcius. And, the term “thermally destabilizing nucleotide” refers to a nucleotide containing one or more thermally destabilizing modifications.

[0350] It has been discovered that dsRNAs with an antisense strand comprising at least one thermally destabilizing modification of the duplex within the first 9 nucleotide positions, counting from the 5′ end, of the antisense strand have reduced off-target gene silencing activity. Accordingly, in some embodiments, the antisense strand comprises at least one (e.g., one, two, three, four, five or more) thermally destabilizing modification of the duplex within the first 9 nucleotide positions of the 5′ region of the antisense strand. In some embodiments, one or more thermally destabilizing modification(s) of the duplex is/are located in positions 2-9, such as, positions 4-8, from the 5′-end of the antisense strand. In some further embodiments, the thermally destabilizing modification(s) of the duplex is/are located at position 6, 7 or 8 from the 5′-end of the antisense strand. In still some further embodiments, the thermally destabilizing modification of the duplex is located at position 7 from the 5′-end of the antisense strand. In some embodiments, the thermally destabilizing modification of the duplex is located at position 2, 3, 4, 5 or 9 from the 5′-end of the antisense strand.

[0351] An iRNA agent comprises a sense strand and an antisense strand, each strand having 14 to 40 nucleotides. The RNAi agent may be represented by formula (L):

[chemical structure]

In formula (L), B1, B2, B3, B1′, B2′, B3′, and B4′ each are independently a nucleotide containing a modification selected from the group consisting of 2′-O-alkyl, 2′-substituted alkoxy, 2′-substituted alkyl, 2′-halo, ENA, and BNA/LNA. In one embodiment, B1, B2, B3, B1′, B2′, B3′, and B4′ each contain 2′-OMe modifications. In one embodiment, B1, B2, B3, B1′, B2′, B3′, and B4′ each contain 2′-OMe or 2′-F modifications. In one embodiment, at least one of B1, B2, B3, B1′, B2′, B3′, and B4′ contain 2′-O—N-methylacetamido (2′-O-NMA, 2′O—CH2C(O)N(Me)H) modification.

[0352] C1 is a thermally destabilizing nucleotide placed at a site opposite to the seed region of the antisense strand (i.e., at positions 2-8 of the 5′-end of the antisense strand, or at positions 2-9 of the 5′-end of the referenced strand). For example, C1 is at a position of the sense strand that pairs with a nucleotide at positions 2-8 of the 5′-end of the antisense strand. In one example, C1 is at position 15 from the 5′-end of the sense strand. C1 nucleotide bears the thermally destabilizing modification which can include abasic modification; mismatch with the opposing nucleotide in the duplex; and sugar modification such as 2′-deoxy modification or acyclic nucleotide e.g., unlocked nucleic acids (UNA) or glycerol nucleic acid (GNA). In one embodiment, C1 has thermally destabilizing modification selected from the group consisting of: i) mismatch with the opposing nucleotide in the antisense strand; ii) abasic modification selected from the group consisting of:

[chemical structure]

and iii) sugar modification selected from the group consisting of:

[chemical structure]

wherein B is a modified or unmodified nucleobase, R¹ and R² independently are H, halogen, OR₃, or alkyl; and R₃ is H, alkyl, cycloalkyl, aryl, aralkyl, heteroaryl or sugar. In one embodiment, the thermally destabilizing modification in C1 is a mismatch selected from the group consisting of G:G, G:A, G:U, G:T, A:A, A:C, C:C, C:U, C:T, U:U, T:T, and U:T; and optionally, at least one nucleobase in the mismatch pair is a 2′-deoxy nucleobase. In one example, the thermally destabilizing modification in C1 is GNA or

[chemical structure]

T1, T1′, T2′, and T3′ each independently represent a nucleotide comprising a modification providing the nucleotide a steric bulk that is less or equal to the steric bulk of a 2′-OMe modification. A steric bulk refers to the sum of steric effects of a modification. Methods for determining steric effects of a modification of a nucleotide are known to one skilled in the art. The modification can be at the 2′ position of a ribose sugar of the nucleotide, or a modification to a non-ribose nucleotide, acyclic nucleotide, or the backbone of the nucleotide that is similar or equivalent to the 2′ position of the ribose sugar, and provides the nucleotide a steric bulk that is less than or equal to the steric bulk of a 2′-OMe modification. For example, T1, T1′, T2′, and T3′ are each independently selected from DNA, RNA, LNA, 2′-F, and 2′-F-5′-methyl. In one embodiment, T1 is DNA. In one embodiment, T1′ is DNA, RNA or LNA. In one embodiment, T2′ is DNA or RNA. In one embodiment, T3′ is DNA or RNA.
[0353] n¹, n³, and q¹ are independently 4 to 15 nucleotides in length.
[0354] n⁵, q³, and q⁷ are independently 1-6 nucleotide(s) in length.
[0355] n⁴, q², and q⁶ are independently 1-3 nucleotide(s) in length; alternatively, n⁴ is 0.
[0356] q⁵ is independently 0-10 nucleotide(s) in length.
[0357] n² and q⁴ are independently 0-3 nucleotide(s) in length.

[0358] Alternatively, n⁴ is 0-3 nucleotide(s) in length.

[0359] In one embodiment, n⁴ can be 0. In one example, n⁴ is 0, and q² and q⁶ are 1. In another example, n⁴ is 0, and q² and q⁶ are 1, with two phosphorothioate internucleotide linkage modifications within position 1-5 of the sense strand (counting from the 5′-end of the sense strand), and two phosphorothioate internucleotide linkage modifications at positions 1 and 2 and two phosphorothioate internucleotide linkage modifications within positions 18-23 of the antisense strand (counting from the 5′-end of the antisense strand).

[0360] In one embodiment, n⁴, q², and q⁶ are each 1.

[0361] In one embodiment, n², n⁴, q² q4, and q⁶ are each 1.

[0362] In one embodiment, C1 is at position 14-17 of the 5′-end of the sense strand, when the sense strand is 19-22 nucleotides in length, and n⁴ is 1. In one embodiment, C1 is at position 15 of the 5′-end of the sense strand

[0363] In one embodiment, T3′ starts at position 2 from the 5′ end of the antisense strand. In one example, T3′ is at position 2 from the 5′ end of the antisense strand and q⁶ is equal to 1.

[0364] In one embodiment, T1′ starts at position 14 from the 5′ end of the antisense strand. In one example, T1′ is at position 14 from the 5′ end of the antisense strand and q² is equal to 1.

[0365] In an exemplary embodiment, T3′ starts from position 2 from the 5′ end of the antisense strand and T1′ starts from position 14 from the 5′ end of the antisense strand. In one example, T3′ starts from position 2 from the 5′ end of the antisense strand and q⁶ is equal to 1 and T1′ starts from position 14 from the 5′ end of the antisense strand and q² is equal to 1.

[0366] In one embodiment, T1′ and T3′ are separated by 11 nucleotides in length (i.e. not counting the T1′ and T3′ nucleotides).

[0367] In one embodiment, T1′ is at position 14 from the 5′ end of the antisense strand. In one example, T1′ is at position 14 from the 5′ end of the antisense strand and q² is equal to 1, and the modification at the 2′ position or positions in a non-ribose, acyclic or backbone that provide less steric bulk than a 2′-OMe ribose.

[0368] In one embodiment, T3′ is at position 2 from the 5′ end of the antisense strand. In one example, T3′ is at position 2 from the 5′ end of the antisense strand and q⁶ is equal to 1, and the modification at the 2′ position or positions in a non-ribose, acyclic or backbone that provide less than or equal to steric bulk than a 2′-OMe ribose.

[0369] In one embodiment, T1 is at the cleavage site of the sense strand. In one example, T1 is at position 11 from the 5′ end of the sense strand, when the sense strand is 19-22 nucleotides in length, and n² is 1. In an exemplary embodiment, T1 is at the cleavage site of the sense strand at position 11 from the 5′ end of the sense strand, when the sense strand is 19-22 nucleotides in length, and n² is 1, In one embodiment, T2′ starts at position 6 from the 5′ end of the antisense strand. In one example, T2′ is at positions 6-10 from the 5′ end of the antisense strand, and q⁴ is 1.

[0370] In an exemplary embodiment, T1 is at the cleavage site of the sense strand, for instance, at position 11 from the 5′ end of the sense strand, when the sense strand is 19-22 nucleotides in length, and n² is 1; T1′ is at position 14 from the 5′ end of the antisense strand, and q² is equal to 1, and the modification to T1′ is at the 2′ position of a ribose sugar or at positions in a non-ribose, acyclic or backbone that provide less steric bulk than a 2′-OMe ribose; T2′ is at positions 6-10 from the 5′ end of the antisense strand, and q⁴ is 1; and T3′ is at position 2 from the 5′ end of the antisense strand, and q is equal to 1, and the modification to T3′ is at the 2′ position or at positions in a non-ribose, acyclic or backbone that provide less than or equal to steric bulk than a 2′-OMe ribose.

[0371] In one embodiment, T2′ starts at position 8 from the 5′ end of the antisense strand. In one example, T2′ starts at position 8 from the 5′ end of the antisense strand, and q⁴ is 2.

[0372] In one embodiment, T2′ starts at position 9 from the 5′ end of the antisense strand. In one example, T2′ is at position 9 from the 5′ end of the antisense strand, and q⁴ is 1.

[0373] In one embodiment, B1′ is 2′-OMe or 2′-F, q¹ is 9, T1′ is 2′-F, q² is 1, B2′ is 2′-OMe or 2′-F, q³ is 4, T2′ is 2′-F, q⁴ is 1, B3′ is 2′-OMe or 2′-F, q⁵ is 6, T3′ is 2′-F, q⁶ is 1, B4′ is 2′-OMe, and q⁷ is 1; with two phosphorothioate internucleotide linkage modifications within positions 1-5 of the sense strand (counting from the 5′-end of the sense strand), and two phosphorothioate internucleotide linkage modifications at positions 1 and 2 and two phosphorothioate internucleotide linkage modifications within positions 18-23 of the antisense strand (counting from the 5′-end of the antisense strand).

[0374] In one embodiment, n⁴ is 0, B3 is 2′-OMe, n⁵ is 3, B1′ is 2′-OMe or 2′-F, q¹ is 9, T1′ is 2′-F, q² is 1, B2′ is 2′-OMe or 2′-F, q³ is 4, T2′ is 2′-F, q⁴ is 1, B3′ is 2′-OMe or 2′-F, q⁵ is 6, T3′ is 2′-F, q⁶ is 1, B4′ is 2′-OMe, and q⁷ is 1; with two phosphorothioate internucleotide linkage modifications within positions 1-5 of the sense strand (counting from the 5′-end of the sense strand), and two phosphorothioate internucleotide linkage modifications at positions 1 and 2 and two phosphorothioate internucleotide linkage modifications within positions 18-23 of the antisense strand (counting from the 5′-end of the antisense strand).

[0375] In one embodiment, B1 is 2′-OMe or 2′-F, n¹ is 8, T1 is 2′F, n² is 3, B2 is 2′-OMe, n³ is 7, n⁴ is 0, B3 is 2′OMe, n⁵ is 3, B1′ is 2′-OMe or 2′-F, q¹ is 9, T1′ is 2′-F, q² is 1, B2′ is 2′-OMe or 2′-F, q³ is 4, T2′ is 2′-F, q⁴ is 2, B3′ is 2′-OMe or 2′-F, q⁵ is 5, T3′ is 2′-F, q⁶ is 1, B4′ is 2′-OMe, and q⁷ is 1.

[0376] In one embodiment, B1 is 2′-OMe or 2′-F, n¹ is 8, T1 is 2′F, n² is 3, B2 is 2′-OMe, n³ is 7, n⁴ is 0, B3 is 2′-OMe, n⁵ is 3, B1′ is 2′-OMe or 2′-F, q¹ is 9, T1′ is 2′-F, q² is 1, B2′ is 2′-OMe or 2′-F, q³ is 4, T2′ is 2′-F, q⁴ is 2, B3′ is 2′-OMe or 2′-F, q⁵ is 5, T3′ is 2′-F, q⁶ is 1, B4′ is 2′-OMe, and q⁷ is 1; with two phosphorothioate internucleotide linkage modifications within positions 1-5 of the sense strand (counting from the 5′-end of the sense strand), and two phosphorothioate internucleotide linkage modifications at positions 1 and 2 and two phosphorothioate internucleotide linkage modifications within positions 18-23 of the antisense strand (counting from the 5′-end of the antisense strand).

[0377] In one embodiment, B1 is 2′-OMe or 2′-F, n¹ is 6, T1 is 2′F, n² is 3, B2 is 2′-OMe, n³ is 7, n⁴ is 0, B3 is 2′OMe, n⁵ is 3, B1′ is 2′-OMe or 2′-F, q¹ is 7, T1′ is 2′-F, q² is 1, B2′ is 2′-OMe or 2′-F, q³ is 4, T2′ is 2′-F, q⁴ is 2, B3′ is 2′-OMe or 2′-F, q⁵ is 5, T3′ is 2′-F, q⁶ is 1, B4′ is 2′-OMe, and q⁷ is 1.

[0378] In one embodiment, B1 is 2′-OMe or 2′-F, n¹ is 6, T1 is 2′F, n² is 3, B2 is 2′-OMe, n³ is 7, n⁴ is 0, B3 is 2′-OMe, n⁵ is 3, B1′ is 2′-OMe or 2′-F, q¹ is 7, T1′ is 2′-F, q² is 1, B2′ is 2′-OMe or 2′-F, q³ is 4, T2′ is 2′-F, q⁴ is 2, B3′ is 2′-OMe or 2′-F, q⁵ is 5, T3′ is 2′-F, q⁶ is 1, B4′ is 2′-OMe, and q⁷ is 1; with two phosphorothioate internucleotide linkage modifications within positions 1-5 of the sense strand (counting from the 5′-end of the sense strand), and two phosphorothioate internucleotide linkage modifications at positions 1 and 2 and two phosphorothioate internucleotide linkage modifications within positions 18-23 of the antisense strand (counting from the 5′-end of the antisense strand).

[0379] In one embodiment, B1 is 2′-OMe or 2′-F, n¹ is 8, T1 is 2′F, n² is 3, B2 is 2′-OMe, n³ is 7, n⁴ is 0, B3 is 2′OMe, n⁵ is 3, B1′ is 2′-OMe or 2′-F, q¹ is 9, T1′ is 2′-F, q² is 1, B2′ is 2′-OMe or 2′-F, q³ is 4, T2′ is 2′-F, q⁴ is 1, B3′ is 2′-OMe or 2′-F, q⁵ is 6, T3′ is 2′-F, q⁶ is 1, B4′ is 2′-OMe, and q⁷ is 1.

[0380] In one embodiment, B1 is 2′-OMe or 2′-F, n¹ is 8, T1 is 2′F, n² is 3, B2 is 2′-OMe, n³ is 7, n⁴ is 0, B3 is 2′-OMe, n⁵ is 3, B1′ is 2′-OMe or 2′-F, q¹ is 9, T1′ is 2′-F, q² is 1, B2′ is 2′-OMe or 2′-F, q³ is 4, T2′ is 2′-F, q⁴ is 1, B3′ is 2′-OMe or 2′-F, q⁵ is 6, T3′ is 2′-F, q⁶ is 1, B4′ is 2′-OMe, and q⁷ is 1; with two phosphorothioate internucleotide linkage modifications within positions 1-5 of the sense strand (counting from the 5′-end of the sense strand), and two phosphorothioate internucleotide linkage modifications at positions 1 and 2 and two phosphorothioate internucleotide linkage modifications within positions 18-23 of the antisense strand (counting from the 5′-end of the antisense strand).

[0381] In one embodiment, B1 is 2′-OMe or 2′-F, n¹ is 8, T1 is 2′F, n² is 3, B2 is 2′-OMe, n³ is 7, n⁴ is 0, B3 is 2′OMe, n⁵ is 3, B1′ is 2′-OMe or 2′-F, q¹ is 9, T1′ is 2′-F, q² is 1, B2′ is 2′-OMe or 2′-F, q³ is 5, T2′ is 2′-F, q⁴ is 1, B3′ is 2′-OMe or 2′-F, q⁵ is 5, T3′ is 2′-F, q⁶ is 1, B4′ is 2′-OMe, and q⁷ is 1; optionally with at least 2 additional TT at the 3′-end of the antisense strand.

[0382] In one embodiment, B1 is 2′-OMe or 2′-F, n¹ is 8, T1 is 2′F, n² is 3, B2 is 2′-OMe, n³ is 7, n⁴ is 0, B3 is 2′-OMe, n⁵ is 3, B1′ is 2′-OMe or 2′-F, q¹ is 9, T1′ is 2′-F, q² is 1, B2′ is 2′-OMe or 2′-F, q³ is 5, T2′ is 2′-F, q⁴ is 1, B3′ is 2′-OMe or 2′-F, q⁵ is 5, T3′ is 2′-F, q⁶ is 1, B4′ is 2′-OMe, and q⁷ is 1; optionally with at least 2 additional TT at the 3′-end of the antisense strand; with two phosphorothioate internucleotide linkage modifications within positions 1-5 of the sense strand (counting from the 5′-end of the sense strand), and two phosphorothioate internucleotide linkage modifications at positions 1 and 2 and two phosphorothioate internucleotide linkage modifications within positions 18-23 of the antisense strand (counting from the 5′-end of the antisense strand). In one embodiment, B1 is 2′-OMe or 2′-F, n¹ is 8, T1 is 2′F, n² is 3, B2 is 2′-OMe, n³ is 7, n⁴ is 0, B3 is 2′-OMe, n⁵ is 3, B1′ is 2′-OMe or 2′-F, q¹ is 9, T1′ is 2′-F, q² is 1, B2′ is 2′-OMe or 2′-F, q³ is 4, q4 is 0, B3′ is 2′-OMe or 2′-F, q⁵ is 7, T3′ is 2′-F, q⁶ is 1, B4′ is 2′-OMe, and q⁷ is 1.

[0383] In one embodiment, B1 is 2′-OMe or 2′-F, n¹ is 8, T1 is 2′F, n² is 3, B2 is 2′-OMe, n³ is 7, n⁴ is 0, B3 is 2′-OMe, n⁵ is 3, B1′ is 2′-OMe or 2′-F, q¹ is 9, T1′ is 2′-F, q² is 1, B2′ is 2′-OMe or 2′-F, q³ is 4, q⁴ is 0, B3′ is 2′-OMe or 2′-F, q⁵ is 7, T3′ is 2′-F, q⁶ is 1, B4′ is 2′-OMe, and q⁷ is 1; with two phosphorothioate internucleotide linkage modifications within positions 1-5 of the sense strand (counting from the 5′-end), and two phosphorothioate internucleotide linkage modifications at positions 1 and 2 and two phosphorothioate internucleotide linkage modifications within positions 18-23 of the antisense strand (counting from the 5′-end).

[0384] In one embodiment, B1 is 2′-OMe or 2′-F, n¹ is 8, T1 is 2′F, n² is 3, B2 is 2′-OMe, n³ is 7, n⁴ is 0, B3 is 2′OMe, n⁵ is 3, B1′ is 2′-OMe or 2′-F, q¹ is 9, T1′ is 2′-F, q² is 1, B2′ is 2′-OMe or 2′-F, q³ is 4, T2′ is 2′-F, q⁴ is 2, B3′ is 2′-OMe or 2′-F, q⁵ is 5, T3′ is 2′-F, q⁶ is 1, B4′ is 2′-F, and q⁷ is 1.

[0385] In one embodiment, B1 is 2′-OMe or 2′-F, n¹ is 8, T1 is 2′F, n² is 3, B2 is 2′-OMe, n³ is 7, n⁴ is 0, B3 is 2′-OMe, n⁵ is 3, B1′ is 2′-OMe or 2′-F, q¹ is 9, T1′ is 2′-F, q² is 1, B2′ is 2′-OMe or 2′-F, q³ is 4, T2′ is 2′-F, q⁴ is 2, B3′ is 2′-OMe or 2′-F, q⁵ is 5, T3′ is 2′-F, q⁶ is 1, B4′ is 2′-F, and q⁷ is 1; with two phosphorothioate internucleotide linkage modifications within positions 1-5 of the sense strand (counting from the 5′-end of the sense strand), and two phosphorothioate internucleotide linkage modifications at positions 1 and 2 and two phosphorothioate internucleotide linkage modifications within positions 18-23 of the antisense strand (counting from the 5′-end of the antisense strand).

[0386] In one embodiment, B1 is 2′-OMe or 2′-F, n¹ is 8, T1 is 2′F, n² is 3, B2 is 2′-OMe, n³ is 7, n⁴ is 0, B3 is 2′-OMe, n⁵ is 3, B1′ is 2′-OMe or 2′-F, q¹ is 9, T1′ is 2′-F, q² is 1, B2′ is 2′-OMe or 2′-F, q³ is 4, q4 is 0, B3′ is 2′-OMe or 2′-F, q⁵ is 7, T3′ is 2′-F, q⁶ is 1, B4′ is 2′-F, and q⁷ is 1.

[0387] In one embodiment, B1 is 2′-OMe or 2′-F, n¹ is 8, T1 is 2′F, n² is 3, B2 is 2′-OMe, n³ is 7, n⁴ is 0, B3 is 2′-OMe, n⁵ is 3, B1′ is 2′-OMe or 2′-F, q¹ is 9, T1′ is 2′-F, q² is 1, B2′ is 2′-OMe or 2′-F, q³ is 4, q⁴ is 0, B3′ is 2′-OMe or 2′-F, q⁵ is 7, T3′ is 2′-F, q⁶ is 1, B4′ is 2′-F, and q⁷ is 1; with two phosphorothioate internucleotide linkage modifications within positions 1-5 of the sense strand (counting from the 5′-end of the sense strand), and two phosphorothioate internucleotide linkage modifications at positions 1 and 2 and two phosphorothioate internucleotide linkage modifications within positions 18-23 of the antisense strand (counting from the 5′-end of the antisense strand).

[0388] The RNAi agent can comprise a phosphorus-containing group at the 5′-end of the sense strand or antisense strand. The 5′-end phosphorus-containing group can be 5′-end phosphate (5′-P), 5′-end phosphorothioate (5′-PS), 5′-end phosphorodithioate (5′-PS₂), 5′-end vinylphosphonate (5′-VP), 5′-end methylphosphonate (MePhos), or 5′-deoxy-5′-C-malonyl

[chemical structure]

When the 5′-end phosphorus-containing group is 5′-end vinylphosphonate (5′-VP), the 5′-VP can be either 5′-E-VP isomer (i.e., trans-vinylphosphonate,

[chemical structure]

5′-Z-VP isomer (i.e., cis-vinylphosphonate,

[chemical structure]

or mixtures thereof.

[0389] In one embodiment, the RNAi agent comprises a phosphorus-containing group at the 5′-end of the sense strand. In one embodiment, the RNAi agent comprises a phosphorus-containing group at the 5′-end of the antisense strand.

[0390] In one embodiment, the RNAi agent comprises a 5′-P. In one embodiment, the RNAi agent comprises a 5′-P in the antisense strand.

[0391] In one embodiment, the RNAi agent comprises a 5′-PS. In one embodiment, the RNAi agent comprises a 5′-PS in the antisense strand.

[0392] In one embodiment, the RNAi agent comprises a 5′-VP. In one embodiment, the RNAi agent comprises a 5′-VP in the antisense strand. In one embodiment, the RNAi agent comprises a 5′-E-VP in the antisense strand. In one embodiment, the RNAi agent comprises a 5′-Z-VP in the antisense strand.

[0393] In one embodiment, the RNAi agent comprises a 5′-PS₂. In one embodiment, the RNAi agent comprises a 5′-PS₂ in the antisense strand.

[0394] In one embodiment, the RNAi agent comprises a 5′-PS₂. In one embodiment, the RNAi agent comprises a 5′-deoxy-5′-C-malonyl in the antisense strand.

[0395] In one embodiment, B1 is 2′-OMe or 2′-F, n¹ is 8, T1 is 2′F, n² is 3, B2 is 2′-OMe, n³ is 7, n⁴ is 0, B3 is 2′OMe, n⁵ is 3, B1′ is 2′-OMe or 2′-F, q¹ is 9, T1′ is 2′-F, q² is 1, B2′ is 2′-OMe or 2′-F, q³ is 4, T2′ is 2′-F, q⁴ is 2, B3′ is 2′-OMe or 2′-F, q⁵ is 5, T3′ is 2′-F, q⁶ is 1, B4′ is 2′-OMe, and q⁷ is 1. The RNAi agent also comprises a 5′-PS.

[0396] In one embodiment, B1 is 2′-OMe or 2′-F, n¹ is 8, T1 is 2′F, n² is 3, B2 is 2′-OMe, n³ is 7, n⁴ is 0, B3 is 2′OMe, n⁵ is 3, B1′ is 2′-OMe or 2′-F, q¹ is 9, T1′ is 2′-F, q² is 1, B2′ is 2′-OMe or 2′-F, q³ is 4, T2′ is 2′-F, q⁴ is 2, B3′ is 2′-OMe or 2′-F, q⁵ is 5, T3′ is 2′-F, q⁶ is 1, B4′ is 2′-OMe, and q⁷ is 1. The RNAi agent also comprises a 5′-P.

[0397] In one embodiment, B1 is 2′-OMe or 2′-F, n¹ is 8, T1 is 2′F, n² is 3, B2 is 2′-OMe, n³ is 7, n⁴ is 0, B3 is 2′OMe, n⁵ is 3, B1′ is 2′-OMe or 2′-F, q¹ is 9, T1′ is 2′-F, q² is 1, B2′ is 2′-OMe or 2′-F, q³ is 4, T2′ is 2′-F, q⁴ is 2, B3′ is 2′-OMe or 2′-F, q⁵ is 5, T3′ is 2′-F, q⁶ is 1, B4′ is 2′-OMe, and q⁷ is 1. The RNAi agent also comprises a 5′-VP. The 5′-VP may be 5′-E-VP, 5′-Z-VP, or combination thereof.

[0398] In one embodiment, B1 is 2′-OMe or 2′-F, n¹ is 8, T1 is 2′F, n² is 3, B2 is 2′-OMe, n³ is 7, n⁴ is 0, B3 is 2′OMe, n⁵ is 3, B1′ is 2′-OMe or 2′-F, q¹ is 9, T1′ is 2′-F, q² is 1, B2′ is 2′-OMe or 2′-F, q³ is 4, T2′ is 2′-F, q⁴ is 2, B3′ is 2′-OMe or 2′-F, q⁵ is 5, T3′ is 2′-F, q⁶ is 1, B4′ is 2′-OMe, and q⁷ is 1. The RNAi agent also comprises a 5′-PS₂.

[0399] In one embodiment, B1 is 2′-OMe or 2′-F, n¹ is 8, T1 is 2′F, n² is 3, B2 is 2′-OMe, n³ is 7, n⁴ is 0, B3 is 2′OMe, n⁵ is 3, B1′ is 2′-OMe or 2′-F, q¹ is 9, T1′ is 2′-F, q² is 1, B2′ is 2′-OMe or 2′-F, q³ is 4, T2′ is 2′-F, q⁴ is 2, B3′ is 2′-OMe or 2′-F, q⁵ is 5, T3′ is 2′-F, q⁶ is 1, B4′ is 2′-OMe, and q⁷ is 1. The RNAi agent also comprises a 5′-deoxy-5′-C-malonyl.

[0400] In one embodiment, B1 is 2′-OMe or 2′-F, n¹ is 8, T1 is 2′F, n² is 3, B2 is 2′-OMe, n³ is 7, n⁴ is 0, B3 is 2′-OMe, n⁵ is 3, B1′ is 2′-OMe or 2′-F, q¹ is 9, T1′ is 2′-F, q² is 1, B2′ is 2′-OMe or 2′-F, q³ is 4, T2′ is 2′-F, q⁴ is 2, B3′ is 2′-OMe or 2′-F, q⁵ is 5, T3′ is 2′-F, q⁶ is 1, B4′ is 2′-OMe, and q⁷ is 1; with two phosphorothioate internucleotide linkage modifications within position 1-5 of the sense strand (counting from the 5′-end of the sense strand), and two phosphorothioate internucleotide linkage modifications at positions 1 and 2 and two phosphorothioate internucleotide linkage modifications within positions 18-23 of the antisense strand (counting from the 5′-end of the antisense strand). The RNAi agent also comprises a 5′-P.

[0401] In one embodiment, B1 is 2′-OMe or 2′-F, n¹ is 8, T1 is 2′F, n² is 3, B2 is 2′-OMe, n³ is 7, n⁴ is 0, B3 is 2′-OMe, n⁵ is 3, B1′ is 2′-OMe or 2′-F, q¹ is 9, T1′ is 2′-F, q² is 1, B2′ is 2′-OMe or 2′-F, q³ is 4, T2′ is 2′-F, q⁴ is 2, B3′ is 2′-OMe or 2′-F, q⁵ is 5, T3′ is 2′-F, q⁶ is 1, B4′ is 2′-OMe, and q⁷ is 1; with two phosphorothioate internucleotide linkage modifications within position 1-5 of the sense strand (counting from the 5′-end of the sense strand), and two phosphorothioate internucleotide linkage modifications at positions 1 and 2 and two phosphorothioate internucleotide linkage modifications within positions 18-23 of the antisense strand (counting from the 5′-end of the antisense strand). The RNAi agent also comprises a 5′-PS.

[0402] In one embodiment, B1 is 2′-OMe or 2′-F, n¹ is 8, T1 is 2′F, n² is 3, B2 is 2′-OMe, n³ is 7, n⁴ is 0, B3 is 2′-OMe, n⁵ is 3, B1′ is 2′-OMe or 2′-F, q¹ is 9, T1′ is 2′-F, q² is 1, B2′ is 2′-OMe or 2′-F, q³ is 4, T2′ is 2′-F, q⁴ is 2, B3′ is 2′-OMe or 2′-F, q⁵ is 5, T3′ is 2′-F, q⁶ is 1, B4′ is 2′-OMe, and q⁷ is 1; with two phosphorothioate internucleotide linkage modifications within position 1-5 of the sense strand (counting from the 5′-end of the sense strand), and two phosphorothioate internucleotide linkage modifications at positions 1 and 2 and two phosphorothioate internucleotide linkage modifications within positions 18-23 of the antisense strand (counting from the 5′-end of the antisense strand). The RNAi agent also comprises a 5′-VP. The 5′-VP may be 5′-E-VP, 5′-Z-VP, or combination thereof.

[0403] In one embodiment, B1 is 2′-OMe or 2′-F, n¹ is 8, T1 is 2′F, n² is 3, B2 is 2′-OMe, n³ is 7, n⁴ is 0, B3 is 2′-OMe, n⁵ is 3, B1′ is 2′-OMe or 2′-F, q¹ is 9, T1′ is 2′-F, q² is 1, B2′ is 2′-OMe or 2′-F, q³ is 4, T2′ is 2′-F, q⁴ is 2, B3′ is 2′-OMe or 2′-F, q⁵ is 5, T3′ is 2′-F, q⁶ is 1, B4′ is 2′-OMe, and q⁷ is 1; with two phosphorothioate internucleotide linkage modifications within position 1-5 of the sense strand (counting from the 5′-end of the sense strand), and two phosphorothioate internucleotide linkage modifications at positions 1 and 2 and two phosphorothioate internucleotide linkage modifications within positions 18-23 of the antisense strand (counting from the 5′-end of the antisense strand). The RNAi agent also comprises a 5′-PS₂.

[0404] In one embodiment, B1 is 2′-OMe or 2′-F, n¹ is 8, T1 is 2′F, n² is 3, B2 is 2′-OMe, n³ is 7, n⁴ is 0, B3 is 2′-OMe, n⁵ is 3, B1′ is 2′-OMe or 2′-F, q¹ is 9, T1′ is 2′-F, q² is 1, B2′ is 2′-OMe or 2′-F, q³ is 4, T2′ is 2′-F, q⁴ is 2, B3′ is 2′-OMe or 2′-F, q⁵ is 5, T3′ is 2′-F, q⁶ is 1, B4′ is 2′-OMe, and q⁷ is 1; with two phosphorothioate internucleotide linkage modifications within position 1-5 of the sense strand (counting from the 5′-end of the sense strand), and two phosphorothioate internucleotide linkage modifications at positions 1 and 2 and two phosphorothioate internucleotide linkage modifications within positions 18-23 of the antisense strand (counting from the 5′-end of the antisense strand). The RNAi agent also comprises a 5′-deoxy-5′-C-malonyl.

[0405] In one embodiment, B1 is 2′-OMe or 2′-F, n¹ is 8, T1 is 2′F, n² is 3, B2 is 2′-OMe, n³ is 7, n⁴ is 0, B3 is 2′-OMe, n⁵ is 3, B1′ is 2′-OMe or 2′-F, q¹ is 9, T1′ is 2′-F, q² is 1, B2′ is 2′-OMe or 2′-F, q³ is 4, q4 is 0, B3′ is 2′-OMe or 2′-F, q⁵ is 7, T3′ is 2′-F, q⁶ is 1, B4′ is 2′-OMe, and q⁷ is 1. The RNAi agent also comprises a 5′-P.

[0406] In one embodiment, B1 is 2′-OMe or 2′-F, n¹ is 8, T1 is 2′F, n² is 3, B2 is 2′-OMe, n³ is 7, n⁴ is 0, B3 is 2′-OMe, n⁵ is 3, B1′ is 2′-OMe or 2′-F, q¹ is 9, T1′ is 2′-F, q² is 1, B2′ is 2′-OMe or 2′-F, q³ is 4, q4 is 0, B3′ is 2′-OMe or 2′-F, q⁵ is 7, T3′ is 2′-F, q⁶ is 1, B4′ is 2′-OMe, and q⁷ is 1. The dsRNA agent also comprises a 5′-PS.

[0407] In one embodiment, B1 is 2′-OMe or 2′-F, n¹ is 8, T1 is 2′F, n² is 3, B2 is 2′-OMe, n³ is 7, n⁴ is 0, B3 is 2′-OMe, n⁵ is 3, B1′ is 2′-OMe or 2′-F, q¹ is 9, T1′ is 2′-F, q² is 1, B2′ is 2′-OMe or 2′-F, q³ is 4, q4 is 0, B3′ is 2′-OMe or 2′-F, q⁵ is 7, T3′ is 2′-F, q⁶ is 1, B4′ is 2′-OMe, and q⁷ is 1. The RNAi agent also comprises a 5′-VP. The 5′-VP may be 5′-E-VP, 5′-Z-VP, or combination thereof.

[0408] In one embodiment, B1 is 2′-OMe or 2′-F, n¹ is 8, T1 is 2′F, n² is 3, B2 is 2′-OMe, n³ is 7, n⁴ is 0, B3 is 2′-OMe, n⁵ is 3, B1′ is 2′-OMe or 2′-F, q¹ is 9, T1′ is 2′-F, q² is 1, B2′ is 2′-OMe or 2′-F, q³ is 4, q⁴ is 0, B3′ is 2′-OMe or 2′-F, q⁵ is 7, T3′ is 2′-F, q⁶ is 1, B4′ is 2′-OMe, and q⁷ is 1. The RNAi agent also comprises a 5′-PS₂.

[0409] In one embodiment, B1 is 2′-OMe or 2′-F, n¹ is 8, T1 is 2′F, n² is 3, B2 is 2′-OMe, n³ is 7, n⁴ is 0, B3 is 2′-OMe, n⁵ is 3, B1′ is 2′-OMe or 2′-F, q¹ is 9, T1′ is 2′-F, q² is 1, B2′ is 2′-OMe or 2′-F, q³ is 4, q⁴ is 0, B3′ is 2′-OMe or 2′-F, q⁵ is 7, T3′ is 2′-F, q⁶ is 1, B4′ is 2′-OMe, and q⁷ is 1. The RNAi agent also comprises a 5′-deoxy-5′-C-malonyl.

[0410] In one embodiment, B1 is 2′-OMe or 2′-F, n¹ is 8, T1 is 2′F, n² is 3, B2 is 2′-OMe, n³ is 7, n⁴ is 0, B3 is 2′-OMe, n⁵ is 3, B1′ is 2′-OMe or 2′-F, q¹ is 9, T1′ is 2′-F, q² is 1, B2′ is 2′-OMe or 2′-F, q³ is 4, q4 is 0, B3′ is 2′-OMe or 2′-F, q⁵ is 7, T3′ is 2′-F, q⁶ is 1, B4′ is 2′-OMe, and q⁷ is 1; with two phosphorothioate internucleotide linkage modifications within position 1-5 of the sense strand (counting from the 5′-end), and two phosphorothioate internucleotide linkage modifications at positions 1 and 2 and two phosphorothioate internucleotide linkage modifications within positions 18-23 of the antisense strand (counting from the 5′-end). The RNAi agent also comprises a 5′-P.

[0411] In one embodiment, B1 is 2′-OMe or 2′-F, n¹ is 8, T1 is 2′F, n² is 3, B2 is 2′-OMe, n³ is 7, n⁴ is 0, B3 is 2′-OMe, n⁵ is 3, B1′ is 2′-OMe or 2′-F, q¹ is 9, T1′ is 2′-F, q² is 1, B2′ is 2′-OMe or 2′-F, q³ is 4, q⁴ is 0, B3′ is 2′-OMe or 2′-F, q⁵ is 7, T3′ is 2′-F, q⁶ is 1, B4′ is 2′-OMe, and q⁷ is 1; with two phosphorothioate internucleotide linkage modifications within position 1-5 of the sense strand (counting from the 5′-end), and two phosphorothioate internucleotide linkage modifications at positions 1 and 2 and two phosphorothioate internucleotide linkage modifications within positions 18-23 of the antisense strand (counting from the 5′-end). The RNAi agent also comprises a 5′-PS.

[0412] In one embodiment, B1 is 2′-OMe or 2′-F, n¹ is 8, T1 is 2′F, n² is 3, B2 is 2′-OMe, n³ is 7, n⁴ is 0, B3 is 2′-OMe, n⁵ is 3, B1′ is 2′-OMe or 2′-F, q¹ is 9, T1′ is 2′-F, q² is 1, B2′ is 2′-OMe or 2′-F, q³ is 4, q⁴ is 0, B3′ is 2′-OMe or 2′-F, q⁵ is 7, T3′ is 2′-F, q⁶ is 1, B4′ is 2′-OMe, and q⁷ is 1; with two phosphorothioate internucleotide linkage modifications within position 1-5 of the sense strand (counting from the 5′-end), and two phosphorothioate internucleotide linkage modifications at positions 1 and 2 and two phosphorothioate internucleotide linkage modifications within positions 18-23 of the antisense strand (counting from the 5′-end). The RNAi agent also comprises a 5′-VP. The 5′-VP may be 5′-E-VP, 5′-Z-VP, or combination thereof.

[0413] In one embodiment, B1 is 2′-OMe or 2′-F, n¹ is 8, T1 is 2′F, n² is 3, B2 is 2′-OMe, n³ is 7, n⁴ is 0, B3 is 2′-OMe, n⁵ is 3, B1′ is 2′-OMe or 2′-F, q¹ is 9, T1′ is 2′-F, q² is 1, B2′ is 2′-OMe or 2′-F, q³ is 4, q4 is 0, B3′ is 2′-OMe or 2′-F, q⁵ is 7, T3′ is 2′-F, q⁶ is 1, B4′ is 2′-OMe, and q⁷ is 1; with two phosphorothioate internucleotide linkage modifications within position 1-5 of the sense strand (counting from the 5′-end), and two phosphorothioate internucleotide linkage modifications at positions 1 and 2 and two phosphorothioate internucleotide linkage modifications within positions 18-23 of the antisense strand (counting from the 5′-end). The RNAi agent also comprises a 5′-PS₂.

[0414] In one embodiment, B1 is 2′-OMe or 2′-F, n¹ is 8, T1 is 2′F, n² is 3, B2 is 2′-OMe, n³ is 7, n⁴ is 0, B3 is 2′-OMe, n⁵ is 3, B1′ is 2′-OMe or 2′-F, q¹ is 9, T1′ is 2′-F, q² is 1, B2′ is 2′-OMe or 2′-F, q³ is 4, q⁴ is 0, B3′ is 2′-OMe or 2′-F, q⁵ is 7, T3′ is 2′-F, q⁶ is 1, B4′ is 2′-OMe, and q⁷ is 1; with two phosphorothioate internucleotide linkage modifications within position 1-5 of the sense strand (counting from the 5′-end), and two phosphorothioate internucleotide linkage modifications at positions 1 and 2 and two phosphorothioate internucleotide linkage modifications within positions 18-23 of the antisense strand (counting from the 5′-end). The RNAi agent also comprises a 5′-deoxy-5′-C-malonyl.

[0415] In one embodiment, B1 is 2′-OMe or 2′-F, n¹ is 8, T1 is 2′F, n² is 3, B2 is 2′-OMe, n³ is 7, n⁴ is 0, B3 is 2′OMe, n⁵ is 3, B1′ is 2′-OMe or 2′-F, q¹ is 9, T1′ is 2′-F, q² is 1, B2′ is 2′-OMe or 2′-F, q³ is 4, T2′ is 2′-F, q⁴ is 2, B3′ is 2′-OMe or 2′-F, q⁵ is 5, T3′ is 2′-F, q⁶ is 1, B4′ is 2′-F, and q⁷ is 1.

[0416] The RNAi agent also comprises a 5′-P.

[0417] In one embodiment, B1 is 2′-OMe or 2′-F, n¹ is 8, T1 is 2′F, n² is 3, B2 is 2′-OMe, n³ is 7, n⁴ is 0, B3 is 2′OMe, n⁵ is 3, B1′ is 2′-OMe or 2′-F, q¹ is 9, T1′ is 2′-F, q² is 1, B2′ is 2′-OMe or 2′-F, q³ is 4, T2′ is 2′-F, q⁴ is 2, B3′ is 2′-OMe or 2′-F, q⁵ is 5, T3′ is 2′-F, q⁶ is 1, B4′ is 2′-F, and q⁷ is 1.

[0418] The RNAi agent also comprises a 5′-PS.

[0419] In one embodiment, B1 is 2′-OMe or 2′-F, n¹ is 8, T1 is 2′F, n² is 3, B2 is 2′-OMe, n³ is 7, n⁴ is 0, B3 is 2′OMe, n⁵ is 3, B1′ is 2′-OMe or 2′-F, q¹ is 9, T1′ is 2′-F, q² is 1, B2′ is 2′-OMe or 2′-F, q³ is 4, T2′ is 2′-F, q⁴ is 2, B3′ is 2′-OMe or 2′-F, q⁵ is 5, T3′ is 2′-F, q⁶ is 1, B4′ is 2′-F, and q⁷ is 1.

[0420] The RNAi agent also comprises a 5′-VP. The 5′-VP may be 5′-E-VP, 5′-Z-VP, or combination thereof.

[0421] In one embodiment, B1 is 2′-OMe or 2′-F, n¹ is 8, T1 is 2′F, n² is 3, B2 is 2′-OMe, n³ is 7, n⁴ is 0, B3 is 2′OMe, n⁵ is 3, B1′ is 2′-OMe or 2′-F, q¹ is 9, T1′ is 2′-F, q² is 1, B2′ is 2′-OMe or 2′-F, q³ is 4, T2′ is 2′-F, q⁴ is 2, B3′ is 2′-OMe or 2′-F, q⁵ is 5, T3′ is 2′-F, q⁶ is 1, B4′ is 2′-F, and q⁷ is 1. The dsRNAi RNA agent also comprises a 5′-PS₂.

[0422] In one embodiment, B1 is 2′-OMe or 2′-F, n¹ is 8, T1 is 2′F, n² is 3, B2 is 2′-OMe, n³ is 7, n⁴ is 0, B3 is 2′OMe, n⁵ is 3, B1′ is 2′-OMe or 2′-F, q¹ is 9, T1′ is 2′-F, q² is 1, B2′ is 2′-OMe or 2′-F, q³ is 4, T2′ is 2′-F, q⁴ is 2, B3′ is 2′-OMe or 2′-F, q⁵ is 5, T3′ is 2′-F, q⁶ is 1, B4′ is 2′-F, and q⁷ is 1.

[0423] The RNAi agent also comprises a 5′-deoxy-5′-C-malonyl.

[0424] In one embodiment, B1 is 2′-OMe or 2′-F, n¹ is 8, T1 is 2′F, n² is 3, B2 is 2′-OMe, n³ is 7, n⁴ is 0, B3 is 2′-OMe, n⁵ is 3, B1′ is 2′-OMe or 2′-F, q¹ is 9, T1′ is 2′-F, q² is 1, B2′ is 2′-OMe or 2′-F, q³ is 4, T2′ is 2′-F, q⁴ is 2, B3′ is 2′-OMe or 2′-F, q⁵ is 5, T3′ is 2′-F, q⁶ is 1, B4′ is 2′-F, and q⁷ is 1; with two phosphorothioate internucleotide linkage modifications within position 1-5 of the sense strand (counting from the 5′-end of the sense strand), and two phosphorothioate internucleotide linkage modifications at positions 1 and 2 and two phosphorothioate internucleotide linkage modifications within positions 18-23 of the antisense strand (counting from the 5′-end of the antisense strand). The RNAi agent also comprises a 5′-P.

[0425] In one embodiment, B1 is 2′-OMe or 2′-F, n¹ is 8, T1 is 2′F, n² is 3, B2 is 2′-OMe, n³ is 7, n⁴ is 0, B3 is 2′-OMe, n⁵ is 3, B1′ is 2′-OMe or 2′-F, q¹ is 9, T1′ is 2′-F, q² is 1, B2′ is 2′-OMe or 2′-F, q³ is 4, T2′ is 2′-F, q⁴ is 2, B3′ is 2′-OMe or 2′-F, q⁵ is 5, T3′ is 2′-F, q⁶ is 1, B4′ is 2′-F, and q⁷ is 1; with two phosphorothioate internucleotide linkage modifications within position 1-5 of the sense strand (counting from the 5′-end of the sense strand), and two phosphorothioate internucleotide linkage modifications at positions 1 and 2 and two phosphorothioate internucleotide linkage modifications within positions 18-23 of the antisense strand (counting from the 5′-end of the antisense strand). The RNAi agent also comprises a 5′-PS.

[0426] In one embodiment, B1 is 2′-OMe or 2′-F, n¹ is 8, T1 is 2′F, n² is 3, B2 is 2′-OMe, n³ is 7, n⁴ is 0, B3 is 2′-OMe, n⁵ is 3, B1′ is 2′-OMe or 2′-F, q¹ is 9, T1′ is 2′-F, q² is 1, B2′ is 2′-OMe or 2′-F, q³ is 4, T2′ is 2′-F, q⁴ is 2, B3′ is 2′-OMe or 2′-F, q⁵ is 5, T3′ is 2′-F, q⁶ is 1, B4′ is 2′-F, and q⁷ is 1; with two phosphorothioate internucleotide linkage modifications within position 1-5 of the sense strand (counting from the 5′-end of the sense strand), and two phosphorothioate internucleotide linkage modifications at positions 1 and 2 and two phosphorothioate internucleotide linkage modifications within positions 18-23 of the antisense strand (counting from the 5′-end of the antisense strand). The RNAi agent also comprises a 5′-VP. The 5′-VP may be 5′-E-VP, 5′-Z-VP, or combination thereof.

[0427] In one embodiment, B1 is 2′-OMe or 2′-F, n¹ is 8, T1 is 2′F, n² is 3, B2 is 2′-OMe, n³ is 7, n⁴ is 0, B3 is 2′-OMe, n⁵ is 3, B1′ is 2′-OMe or 2′-F, q¹ is 9, T1′ is 2′-F, q² is 1, B2′ is 2′-OMe or 2′-F, q³ is 4, T2′ is 2′-F, q⁴ is 2, B3′ is 2′-OMe or 2′-F, q⁵ is 5, T3′ is 2′-F, q⁶ is 1, B4′ is 2′-F, and q⁷ is 1; with two phosphorothioate internucleotide linkage modifications within position 1-5 of the sense strand (counting from the 5′-end of the sense strand), and two phosphorothioate internucleotide linkage modifications at positions 1 and 2 and two phosphorothioate internucleotide linkage modifications within positions 18-23 of the antisense strand (counting from the 5′-end of the antisense strand). The RNAi agent also comprises a 5′-PS₂.

[0428] In one embodiment, B1 is 2′-OMe or 2′-F, n¹ is 8, T1 is 2′F, n² is 3, B2 is 2′-OMe, n³ is 7, n⁴ is 0, B3 is 2′-OMe, n⁵ is 3, B1′ is 2′-OMe or 2′-F, q¹ is 9, T1′ is 2′-F, q² is 1, B2′ is 2′-OMe or 2′-F, q³ is 4, T2′ is 2′-F, q⁴ is 2, B3′ is 2′-OMe or 2′-F, q⁵ is 5, T3′ is 2′-F, q⁶ is 1, B4′ is 2′-F, and q⁷ is 1; with two phosphorothioate internucleotide linkage modifications within position 1-5 of the sense strand (counting from the 5′-end of the sense strand), and two phosphorothioate internucleotide linkage modifications at positions 1 and 2 and two phosphorothioate internucleotide linkage modifications within positions 18-23 of the antisense strand (counting from the 5′-end of the antisense strand). The RNAi agent also comprises a 5′-deoxy-5′-C-malonyl.

[0429] In one embodiment, B1 is 2′-OMe or 2′-F, n¹ is 8, T1 is 2′F, n² is 3, B2 is 2′-OMe, n³ is 7, n⁴ is 0, B3 is 2′-OMe, n⁵ is 3, B1′ is 2′-OMe or 2′-F, q¹ is 9, T1′ is 2′-F, q² is 1, B2′ is 2′-OMe or 2′-F, q³ is 4, q4 is 0, B3′ is 2′-OMe or 2′-F, q⁵ is 7, T3′ is 2′-F, q⁶ is 1, B4′ is 2′-F, and q⁷ is 1. The RNAi agent also comprises a 5′-P.

[0430] In one embodiment, B1 is 2′-OMe or 2′-F, n¹ is 8, T1 is 2′F, n² is 3, B2 is 2′-OMe, n³ is 7, n⁴ is 0, B3 is 2′-OMe, n⁵ is 3, B1′ is 2′-OMe or 2′-F, q¹ is 9, T1′ is 2′-F, q² is 1, B2′ is 2′-OMe or 2′-F, q³ is 4, q4 is 0, B3′ is 2′-OMe or 2′-F, q⁵ is 7, T3′ is 2′-F, q⁶ is 1, B4′ is 2′-F, and q⁷ is 1. The RNAi agent also comprises a 5′-PS.

[0431] In one embodiment, B1 is 2′-OMe or 2′-F, n¹ is 8, T1 is 2′F, n² is 3, B2 is 2′-OMe, n³ is 7, n⁴ is 0, B3 is 2′-OMe, n⁵ is 3, B1′ is 2′-OMe or 2′-F, q¹ is 9, T1′ is 2′-F, q² is 1, B2′ is 2′-OMe or 2′-F, q³ is 4, q4 is 0, B3′ is 2′-OMe or 2′-F, q⁵ is 7, T3′ is 2′-F, q⁶ is 1, B4′ is 2′-F, and q⁷ is 1. The RNAi agent also comprises a 5′-VP. The 5′-VP may be 5′-E-VP, 5′-Z-VP, or combination thereof.

[0432] In one embodiment, B1 is 2′-OMe or 2′-F, n¹ is 8, T1 is 2′F, n² is 3, B2 is 2′-OMe, n³ is 7, n⁴ is 0, B3 is 2′-OMe, n⁵ is 3, B1′ is 2′-OMe or 2′-F, q¹ is 9, T1′ is 2′-F, q² is 1, B2′ is 2′-OMe or 2′-F, q³ is 4, q⁴ is 0, B3′ is 2′-OMe or 2′-F, q⁵ is 7, T3′ is 2′-F, q⁶ is 1, B4′ is 2′-F, and q⁷ is 1. The RNAi agent also comprises a 5′-PS₂.

[0433] In one embodiment, B1 is 2′-OMe or 2′-F, n¹ is 8, T1 is 2′F, n² is 3, B2 is 2′-OMe, n³ is 7, n⁴ is 0, B3 is 2′-OMe, n⁵ is 3, B1′ is 2′-OMe or 2′-F, q¹ is 9, T1′ is 2′-F, q² is 1, B2′ is 2′-OMe or 2′-F, q³ is 4, q4 is 0, B3′ is 2′-OMe or 2′-F, q⁵ is 7, T3′ is 2′-F, q⁶ is 1, B4′ is 2′-F, and q⁷ is 1. The RNAi agent also comprises a 5′-deoxy-5′-C-malonyl.

[0434] In one embodiment, B1 is 2′-OMe or 2′-F, n¹ is 8, T1 is 2′F, n² is 3, B2 is 2′-OMe, n³ is 7, n⁴ is 0, B3 is 2′-OMe, n⁵ is 3, B1′ is 2′-OMe or 2′-F, q¹ is 9, T1′ is 2′-F, q² is 1, B2′ is 2′-OMe or 2′-F, q³ is 4, q4 is 0, B3′ is 2′-OMe or 2′-F, q⁵ is 7, T3′ is 2′-F, q⁶ is 1, B4′ is 2′-F, and q⁷ is 1; with two phosphorothioate internucleotide linkage modifications within position 1-5 of the sense strand (counting from the 5′-end of the sense strand), and two phosphorothioate internucleotide linkage modifications at positions 1 and 2 and two phosphorothioate internucleotide linkage modifications within positions 18-23 of the antisense strand (counting from the 5′-end of the antisense strand). The RNAi agent also comprises a 5′-P.

[0435] In one embodiment, B1 is 2′-OMe or 2′-F, n¹ is 8, T1 is 2′F, n² is 3, B2 is 2′-OMe, n³ is 7, n⁴ is 0, B3 is 2′-OMe, n⁵ is 3, B1′ is 2′-OMe or 2′-F, q¹ is 9, T1′ is 2′-F, q² is 1, B2′ is 2′-OMe or 2′-F, q³ is 4, q4 is 0, B3′ is 2′-OMe or 2′-F, q⁵ is 7, T3′ is 2′-F, q⁶ is 1, B4′ is 2′-F, and q⁷ is 1; with two phosphorothioate internucleotide linkage modifications within position 1-5 of the sense strand (counting from the 5′-end of the sense strand), and two phosphorothioate internucleotide linkage modifications at positions 1 and 2 and two phosphorothioate internucleotide linkage modifications within positions 18-23 of the antisense strand (counting from the 5′-end of the antisense strand). The RNAi agent also comprises a 5′-PS.

[0436] In one embodiment, B1 is 2′-OMe or 2′-F, n¹ is 8, T1 is 2′F, n² is 3, B2 is 2′-OMe, n³ is 7, n⁴ is 0, B3 is 2′-OMe, n⁵ is 3, B1′ is 2′-OMe or 2′-F, q¹ is 9, T1′ is 2′-F, q² is 1, B2′ is 2′-OMe or 2′-F, q³ is 4, q4 is 0, B3′ is 2′-OMe or 2′-F, q⁵ is 7, T3′ is 2′-F, q⁶ is 1, B4′ is 2′-F, and q⁷ is 1; with two phosphorothioate internucleotide linkage modifications within position 1-5 of the sense strand (counting from the 5′-end of the sense strand), and two phosphorothioate internucleotide linkage modifications at positions 1 and 2 and two phosphorothioate internucleotide linkage modifications within positions 18-23 of the antisense strand (counting from the 5′-end of the antisense strand). The RNAi agent also comprises a 5′-VP. The 5′-VP may be 5′-E-VP, 5′-Z-VP, or combination thereof.

[0437] In one embodiment, B1 is 2′-OMe or 2′-F, n¹ is 8, T1 is 2′F, n² is 3, B2 is 2′-OMe, n³ is 7, n⁴ is 0, B3 is 2′-OMe, n⁵ is 3, B1′ is 2′-OMe or 2′-F, q¹ is 9, T1′ is 2′-F, q² is 1, B2′ is 2′-OMe or 2′-F, q³ is 4, q4 is 0, B3′ is 2′-OMe or 2′-F, q⁵ is 7, T3′ is 2′-F, q⁶ is 1, B4′ is 2′-F, and q⁷ is 1; with two phosphorothioate internucleotide linkage modifications within position 1-5 of the sense strand (counting from the 5′-end of the sense strand), and two phosphorothioate internucleotide linkage modifications at positions 1 and 2 and two phosphorothioate internucleotide linkage modifications within positions 18-23 of the antisense strand (counting from the 5′-end of the antisense strand). The RNAi agent also comprises a 5′-PS₂.

[0438] In one embodiment, B1 is 2′-OMe or 2′-F, n¹ is 8, T1 is 2′F, n² is 3, B2 is 2′-OMe, n³ is 7, n⁴ is 0, B3 is 2′-OMe, n⁵ is 3, B1′ is 2′-OMe or 2′-F, q¹ is 9, T1′ is 2′-F, q² is 1, B2′ is 2′-OMe or 2′-F, q³ is 4, q4 is 0, B3′ is 2′-OMe or 2′-F, q⁵ is 7, T3′ is 2′-F, q⁶ is 1, B4′ is 2′-F, and q⁷ is 1; with two phosphorothioate internucleotide linkage modifications within position 1-5 of the sense strand (counting from the 5′-end of the sense strand), and two phosphorothioate internucleotide linkage modifications at positions 1 and 2 and two phosphorothioate internucleotide linkage modifications within positions 18-23 of the antisense strand (counting from the 5′-end of the antisense strand). The RNAi agent also comprises a 5′-deoxy-5′-C-malonyl.

[0439] In one embodiment, B1 is 2′-OMe or 2′-F, n¹ is 8, T1 is 2′F, n² is 3, B2 is 2′-OMe, n³ is 7, n⁴ is 0, B3 is 2′-OMe, n⁵ is 3, B1′ is 2′-OMe or 2′-F, q¹ is 9, T1′ is 2′-F, q² is 1, B2′ is 2′-OMe or 2′-F, q³ is 4, T2′ is 2′-F, q⁴ is 2, B3′ is 2′-OMe or 2′-F, q⁵ is 5, T3′ is 2′-F, q⁶ is 1, B4′ is 2′-OMe, and q⁷ is 1; with two phosphorothioate internucleotide linkage modifications within position 1-5 of the sense strand (counting from the 5′-end of the sense strand), and two phosphorothioate internucleotide linkage modifications at positions 1 and 2 and two phosphorothioate internucleotide linkage modifications within positions 18-23 of the antisense strand (counting from the 5′-end of the antisense strand). The RNAi agent also comprises a 5′-P and a targeting ligand. In one embodiment, the 5′-P is at the 5′-end of the antisense strand, and the targeting ligand is at the 3′-end of the sense strand.

[0440] In one embodiment, B1 is 2′-OMe or 2′-F, n¹ is 8, T1 is 2′F, n² is 3, B2 is 2′-OMe, n³ is 7, n⁴ is 0, B3 is 2′-OMe, n⁵ is 3, B1′ is 2′-OMe or 2′-F, q¹ is 9, T1′ is 2′-F, q² is 1, B2′ is 2′-OMe or 2′-F, q³ is 4, T2′ is 2′-F, q⁴ is 2, B3′ is 2′-OMe or 2′-F, q⁵ is 5, T3′ is 2′-F, q⁶ is 1, B4′ is 2′-OMe, and q⁷ is 1; with two phosphorothioate internucleotide linkage modifications within position 1-5 of the sense strand (counting from the 5′-end of the sense strand), and two phosphorothioate internucleotide linkage modifications at positions 1 and 2 and two phosphorothioate internucleotide linkage modifications within positions 18-23 of the antisense strand (counting from the 5′-end of the antisense strand). The RNAi agent also comprises a 5′-PS and a targeting ligand. In one embodiment, the 5′-PS is at the 5′-end of the antisense strand, and the targeting ligand is at the 3′-end of the sense strand.

[0441] In one embodiment, B1 is 2′-OMe or 2′-F, n¹ is 8, T1 is 2′F, n² is 3, B2 is 2′-OMe, n³ is 7, n⁴ is 0, B3 is 2′-OMe, n⁵ is 3, B1′ is 2′-OMe or 2′-F, q¹ is 9, T1′ is 2′-F, q² is 1, B2′ is 2′-OMe or 2′-F, q³ is 4, T2′ is 2′-F, q⁴ is 2, B3′ is 2′-OMe or 2′-F, q⁵ is 5, T3′ is 2′-F, q⁶ is 1, B4′ is 2′-OMe, and q⁷ is 1; with two phosphorothioate internucleotide linkage modifications within position 1-5 of the sense strand (counting from the 5′-end of the sense strand), and two phosphorothioate internucleotide linkage modifications at positions 1 and 2 and two phosphorothioate internucleotide linkage modifications within positions 18-23 of the antisense strand (counting from the 5′-end of the antisense strand). The RNAi agent also comprises a 5′-VP (e.g., a 5′-E-VP, 5′-Z-VP, or combination thereof), and a targeting ligand.

[0442] In one embodiment, the 5′-VP is at the 5′-end of the antisense strand, and the targeting ligand is at the 3′-end of the sense strand.

[0443] In one embodiment, B1 is 2′-OMe or 2′-F, n¹ is 8, T1 is 2′F, n² is 3, B2 is 2′-OMe, n³ is 7, n⁴ is 0, B3 is 2′-OMe, n⁵ is 3, B1′ is 2′-OMe or 2′-F, q¹ is 9, T1′ is 2′-F, q² is 1, B2′ is 2′-OMe or 2′-F, q³ is 4, T2′ is 2′-F, q⁴ is 2, B3′ is 2′-OMe or 2′-F, q⁵ is 5, T3′ is 2′-F, q⁶ is 1, B4′ is 2′-OMe, and q⁷ is 1; with two phosphorothioate internucleotide linkage modifications within position 1-5 of the sense strand (counting from the 5′-end of the sense strand), and two phosphorothioate internucleotide linkage modifications at positions 1 and 2 and two phosphorothioate internucleotide linkage modifications within positions 18-23 of the antisense strand (counting from the 5′-end of the antisense strand). The RNAi agent also comprises a 5′-PS₂ and a targeting ligand. In one embodiment, the 5′-PS₂ is at the 5′-end of the antisense strand, and the targeting ligand is at the 3′-end of the sense strand.

[0444] In one embodiment, B1 is 2′-OMe or 2′-F, n¹ is 8, T1 is 2′F, n² is 3, B2 is 2′-OMe, n³ is 7, n⁴ is 0, B3 is 2′-OMe, n⁵ is 3, B1′ is 2′-OMe or 2′-F, q¹ is 9, T1′ is 2′-F, q² is 1, B2′ is 2′-OMe or 2′-F, q³ is 4, T2′ is 2′-F, q⁴ is 2, B3′ is 2′-OMe or 2′-F, q⁵ is 5, T3′ is 2′-F, q⁶ is 1, B4′ is 2′-OMe, and q⁷ is 1; with two phosphorothioate internucleotide linkage modifications within position 1-5 of the sense strand (counting from the 5′-end of the sense strand), and two phosphorothioate internucleotide linkage modifications at positions 1 and 2 and two phosphorothioate internucleotide linkage modifications within positions 18-23 of the antisense strand (counting from the 5′-end of the antisense strand). The RNAi agent also comprises a 5′-deoxy-5′-C-malonyl and a targeting ligand. In one embodiment, the 5′-deoxy-5′-C-malonyl is at the 5′-end of the antisense strand, and the targeting ligand is at the 3′-end of the sense strand.

[0445] In one embodiment, B1 is 2′-OMe or 2′-F, n¹ is 8, T1 is 2′F, n² is 3, B2 is 2′-OMe, n³ is 7, n⁴ is 0, B3 is 2′-OMe, n⁵ is 3, B1′ is 2′-OMe or 2′-F, q¹ is 9, T1′ is 2′-F, q² is 1, B2′ is 2′-OMe or 2′-F, q³ is 4, q⁴ is 0, B3′ is 2′-OMe or 2′-F, q⁵ is 7, T3′ is 2′-F, q⁶ is 1, B4′ is 2′-OMe, and q⁷ is 1; with two phosphorothioate internucleotide linkage modifications within position 1-5 of the sense strand (counting from the 5′-end), and two phosphorothioate internucleotide linkage modifications at positions 1 and 2 and two phosphorothioate internucleotide linkage modifications within positions 18-23 of the antisense strand (counting from the 5′-end). The RNAi agent also comprises a 5′-P and a targeting ligand. In one embodiment, the 5′-P is at the 5′-end of the antisense strand, and the targeting ligand is at the 3′-end of the sense strand.

[0446] In one embodiment, B1 is 2′-OMe or 2′-F, n¹ is 8, T1 is 2′F, n² is 3, B2 is 2′-OMe, n³ is 7, n⁴ is 0, B3 is 2′-OMe, n⁵ is 3, B1′ is 2′-OMe or 2′-F, q¹ is 9, T1′ is 2′-F, q² is 1, B2′ is 2′-OMe or 2′-F, q³ is 4, q4 is 0, B3′ is 2′-OMe or 2′-F, q⁵ is 7, T3′ is 2′-F, q⁶ is 1, B4′ is 2′-OMe, and q⁷ is 1; with two phosphorothioate internucleotide linkage modifications within position 1-5 of the sense strand (counting from the 5′-end), and two phosphorothioate internucleotide linkage modifications at positions 1 and 2 and two phosphorothioate internucleotide linkage modifications within positions 18-23 of the antisense strand (counting from the 5′-end). The RNAi agent also comprises a 5′-PS and a targeting ligand. In one embodiment, the 5′-PS is at the 5′-end of the antisense strand, and the targeting ligand is at the 3′-end of the sense strand.

[0447] In one embodiment, B1 is 2′-OMe or 2′-F, n¹ is 8, T1 is 2′F, n² is 3, B2 is 2′-OMe, n³ is 7, n⁴ is 0, B3 is 2′-OMe, n⁵ is 3, B1′ is 2′-OMe or 2′-F, q¹ is 9, T1′ is 2′-F, q² is 1, B2′ is 2′-OMe or 2′-F, q³ is 4, q4 is 0, B3′ is 2′-OMe or 2′-F, q⁵ is 7, T3′ is 2′-F, q⁶ is 1, B4′ is 2′-OMe, and q⁷ is 1; with two phosphorothioate internucleotide linkage modifications within position 1-5 of the sense strand (counting from the 5′-end), and two phosphorothioate internucleotide linkage modifications at positions 1 and 2 and two phosphorothioate internucleotide linkage modifications within positions 18-23 of the antisense strand (counting from the 5′-end). The RNAi agent also comprises a 5′-VP (e.g., a 5′-E-VP, 5′-Z-VP, or combination thereof) and a targeting ligand. In one embodiment, the 5′-VP is at the 5′-end of the antisense strand, and the targeting ligand is at the 3′-end of the sense strand.

[0448] In one embodiment, B1 is 2′-OMe or 2′-F, n¹ is 8, T1 is 2′F, n² is 3, B2 is 2′-OMe, n³ is 7, n⁴ is 0, B3 is 2′-OMe, n⁵ is 3, B1′ is 2′-OMe or 2′-F, q¹ is 9, T1′ is 2′-F, q² is 1, B2′ is 2′-OMe or 2′-F, q³ is 4, q4 is 0, B3′ is 2′-OMe or 2′-F, q⁵ is 7, T3′ is 2′-F, q⁶ is 1, B4′ is 2′-OMe, and q⁷ is 1; with two phosphorothioate internucleotide linkage modifications within position 1-5 of the sense strand (counting from the 5′-end), and two phosphorothioate internucleotide linkage modifications at positions 1 and 2 and two phosphorothioate internucleotide linkage modifications within positions 18-23 of the antisense strand (counting from the 5′-end). The RNAi agent also comprises a 5′-PS₂ and a targeting ligand. In one embodiment, the 5′-PS₂ is at the 5′-end of the antisense strand, and the targeting ligand is at the 3′-end of the sense strand.

[0449] In one embodiment, B1 is 2′-OMe or 2′-F, n¹ is 8, T1 is 2′F, n² is 3, B2 is 2′-OMe, n³ is 7, n⁴ is 0, B3 is 2′-OMe, n⁵ is 3, B1′ is 2′-OMe or 2′-F, q¹ is 9, T1′ is 2′-F, q² is 1, B2′ is 2′-OMe or 2′-F, q³ is 4, q4 is 0, B3′ is 2′-OMe or 2′-F, q⁵ is 7, T3′ is 2′-F, q⁶ is 1, B4′ is 2′-OMe, and q⁷ is 1; with two phosphorothioate internucleotide linkage modifications within position 1-5 of the sense strand (counting from the 5′-end), and two phosphorothioate internucleotide linkage modifications at positions 1 and 2 and two phosphorothioate internucleotide linkage modifications within positions 18-23 of the antisense strand (counting from the 5′-end). The RNAi agent also comprises a 5′-deoxy-5′-C-malonyl and a targeting ligand. In one embodiment, the 5′-deoxy-5′-C-malonyl is at the 5′-end of the antisense strand, and the targeting ligand is at the 3′-end of the sense strand.

[0450] In one embodiment, B1 is 2′-OMe or 2′-F, n¹ is 8, T1 is 2′F, n² is 3, B2 is 2′-OMe, n³ is 7, n⁴ is 0, B3 is 2′-OMe, n⁵ is 3, B1′ is 2′-OMe or 2′-F, q¹ is 9, T1′ is 2′-F, q² is 1, B2′ is 2′-OMe or 2′-F, q³ is 4, T2′ is 2′-F, q⁴ is 2, B3′ is 2′-OMe or 2′-F, q⁵ is 5, T3′ is 2′-F, q⁶ is 1, B4′ is 2′-F, and q⁷ is 1; with two phosphorothioate internucleotide linkage modifications within position 1-5 of the sense strand (counting from the 5′-end of the sense strand), and two phosphorothioate internucleotide linkage modifications at positions 1 and 2 and two phosphorothioate internucleotide linkage modifications within positions 18-23 of the antisense strand (counting from the 5′-end of the antisense strand). The RNAi agent also comprises a 5′-P and a targeting ligand. In one embodiment, the 5′-P is at the 5′-end of the antisense strand, and the targeting ligand is at the 3′-end of the sense strand.

[0451] In one embodiment, B1 is 2′-OMe or 2′-F, n¹ is 8, T1 is 2′F, n² is 3, B2 is 2′-OMe, n³ is 7, n⁴ is 0, B3 is 2′-OMe, n⁵ is 3, B1′ is 2′-OMe or 2′-F, q¹ is 9, T1′ is 2′-F, q² is 1, B2′ is 2′-OMe or 2′-F, q³ is 4, T2′ is 2′-F, q⁴ is 2, B3′ is 2′-OMe or 2′-F, q⁵ is 5, T3′ is 2′-F, q⁶ is 1, B4′ is 2′-F, and q⁷ is 1; with two phosphorothioate internucleotide linkage modifications within position 1-5 of the sense strand (counting from the 5′-end of the sense strand), and two phosphorothioate internucleotide linkage modifications at positions 1 and 2 and two phosphorothioate internucleotide linkage modifications within positions 18-23 of the antisense strand (counting from the 5′-end of the antisense strand). The RNAi agent also comprises a 5′-PS and a targeting ligand. In one embodiment, the 5′-PS is at the 5′-end of the antisense strand, and the targeting ligand is at the 3′-end of the sense strand.

[0452] In one embodiment, B1 is 2′-OMe or 2′-F, n¹ is 8, T1 is 2′F, n² is 3, B2 is 2′-OMe, n³ is 7, n⁴ is 0, B3 is 2′-OMe, n⁵ is 3, B1′ is 2′-OMe or 2′-F, q¹ is 9, T1′ is 2′-F, q² is 1, B2′ is 2′-OMe or 2′-F, q³ is 4, T2′ is 2′-F, q⁴ is 2, B3′ is 2′-OMe or 2′-F, q⁵ is 5, T3′ is 2′-F, q⁶ is 1, B4′ is 2′-F, and q⁷ is 1; with two phosphorothioate internucleotide linkage modifications within position 1-5 of the sense strand (counting from the 5′-end of the sense strand), and two phosphorothioate internucleotide linkage modifications at positions 1 and 2 and two phosphorothioate internucleotide linkage modifications within positions 18-23 of the antisense strand (counting from the 5′-end of the antisense strand). The RNAi agent also comprises a 5′-VP (e.g., a 5′-E-VP, 5′-Z-VP, or combination thereof) and a targeting ligand. In one embodiment, the 5′-VP is at the 5′-end of the antisense strand, and the targeting ligand is at the 3′-end of the sense strand.

[0453] In one embodiment, B1 is 2′-OMe or 2′-F, n¹ is 8, T1 is 2′F, n² is 3, B2 is 2′-OMe, n³ is 7, n⁴ is 0, B3 is 2′-OMe, n⁵ is 3, B1′ is 2′-OMe or 2′-F, q¹ is 9, T1′ is 2′-F, q² is 1, B2′ is 2′-OMe or 2′-F, q³ is 4, T2′ is 2′-F, q⁴ is 2, B3′ is 2′-OMe or 2′-F, q⁵ is 5, T3′ is 2′-F, q⁶ is 1, B4′ is 2′-F, and q⁷ is 1; with two phosphorothioate internucleotide linkage modifications within position 1-5 of the sense strand (counting from the 5′-end of the sense strand), and two phosphorothioate internucleotide linkage modifications at positions 1 and 2 and two phosphorothioate internucleotide linkage modifications within positions 18-23 of the antisense strand (counting from the 5′-end of the antisense strand). The RNAi agent also comprises a 5′-PS₂ and a targeting ligand. In one embodiment, the 5′-PS₂ is at the 5′-end of the antisense strand, and the targeting ligand is at the 3′-end of the sense strand.

[0454] In one embodiment, B1 is 2′-OMe or 2′-F, n¹ is 8, T1 is 2′F, n² is 3, B2 is 2′-OMe, n³ is 7, n⁴ is 0, B3 is 2′-OMe, n⁵ is 3, B1′ is 2′-OMe or 2′-F, q¹ is 9, T1′ is 2′-F, q² is 1, B2′ is 2′-OMe or 2′-F, q³ is 4, T2′ is 2′-F, q⁴ is 2, B3′ is 2′-OMe or 2′-F, q⁵ is 5, T3′ is 2′-F, q⁶ is 1, B4′ is 2′-F, and q⁷ is 1; with two phosphorothioate internucleotide linkage modifications within position 1-5 of the sense strand (counting from the 5′-end of the sense strand), and two phosphorothioate internucleotide linkage modifications at positions 1 and 2 and two phosphorothioate internucleotide linkage modifications within positions 18-23 of the antisense strand (counting from the 5′-end of the antisense strand). The RNAi agent also comprises a 5′-deoxy-5′-C-malonyl and a targeting ligand. In one embodiment, the 5′-deoxy-5′-C-malonyl is at the 5′-end of the antisense strand, and the targeting ligand is at the 3′-end of the sense strand.

[0455] In one embodiment, B1 is 2′-OMe or 2′-F, n¹ is 8, T1 is 2′F, n² is 3, B2 is 2′-OMe, n³ is 7, n⁴ is 0, B3 is 2′-OMe, n⁵ is 3, B1′ is 2′-OMe or 2′-F, q¹ is 9, T1′ is 2′-F, q² is 1, B2′ is 2′-OMe or 2′-F, q³ is 4, q⁴ is 0, B3′ is 2′-OMe or 2′-F, q⁵ is 7, T3′ is 2′-F, q⁶ is 1, B4′ is 2′-F, and q⁷ is 1; with two phosphorothioate internucleotide linkage modifications within position 1-5 of the sense strand (counting from the 5′-end of the sense strand), and two phosphorothioate internucleotide linkage modifications at positions 1 and 2 and two phosphorothioate internucleotide linkage modifications within positions 18-23 of the antisense strand (counting from the 5′-end of the antisense strand). The RNAi agent also comprises a 5′-P and a targeting ligand. In one embodiment, the 5′-P is at the 5′-end of the antisense strand, and the targeting ligand is at the 3′-end of the sense strand.

[0456] In one embodiment, B1 is 2′-OMe or 2′-F, n¹ is 8, T1 is 2′F, n² is 3, B2 is 2′-OMe, n³ is 7, n⁴ is 0, B3 is 2′-OMe, n⁵ is 3, B1′ is 2′-OMe or 2′-F, q¹ is 9, T1′ is 2′-F, q² is 1, B2′ is 2′-OMe or 2′-F, q³ is 4, q4 is 0, B3′ is 2′-OMe or 2′-F, q⁵ is 7, T3′ is 2′-F, q⁶ is 1, B4′ is 2′-F, and q⁷ is 1; with two phosphorothioate internucleotide linkage modifications within position 1-5 of the sense strand (counting from the 5′-end of the sense strand), and two phosphorothioate internucleotide linkage modifications at positions 1 and 2 and two phosphorothioate internucleotide linkage modifications within positions 18-23 of the antisense strand (counting from the 5′-end of the antisense strand). The RNAi agent also comprises a 5′-PS and a targeting ligand. In one embodiment, the 5′-PS is at the 5′-end of the antisense strand, and the targeting ligand is at the 3′-end of the sense strand.

[0457] In one embodiment, B1 is 2′-OMe or 2′-F, n¹ is 8, T1 is 2′F, n² is 3, B2 is 2′-OMe, n³ is 7, n⁴ is 0, B3 is 2′-OMe, n⁵ is 3, B1′ is 2′-OMe or 2′-F, q¹ is 9, T1′ is 2′-F, q² is 1, B2′ is 2′-OMe or 2′-F, q³ is 4, q⁴ is 0, B3′ is 2′-OMe or 2′-F, q⁵ is 7, T3′ is 2′-F, q⁶ is 1, B4′ is 2′-F, and q⁷ is 1; with two phosphorothioate internucleotide linkage modifications within position 1-5 of the sense strand (counting from the 5′-end of the sense strand), and two phosphorothioate internucleotide linkage modifications at positions 1 and 2 and two phosphorothioate internucleotide linkage modifications within positions 18-23 of the antisense strand (counting from the 5′-end of the antisense strand). The RNAi agent also comprises a 5′-VP (e.g., a 5′-E-VP, 5′-Z-VP, or combination thereof) and a targeting ligand. In one embodiment, the 5′-VP is at the 5′-end of the antisense strand, and the targeting ligand is at the 3′-end of the sense strand.

[0458] In one embodiment, B1 is 2′-OMe or 2′-F, n¹ is 8, T1 is 2′F, n² is 3, B2 is 2′-OMe, n³ is 7, n⁴ is 0, B3 is 2′-OMe, n⁵ is 3, B1′ is 2′-OMe or 2′-F, q¹ is 9, T1′ is 2′-F, q² is 1, B2′ is 2′-OMe or 2′-F, q³ is 4, q4 is 0, B3′ is 2′-OMe or 2′-F, q⁵ is 7, T3′ is 2′-F, q⁶ is 1, B4′ is 2′-F, and q⁷ is 1; with two phosphorothioate internucleotide linkage modifications within position 1-5 of the sense strand (counting from the 5′-end of the sense strand), and two phosphorothioate internucleotide linkage modifications at positions 1 and 2 and two phosphorothioate internucleotide linkage modifications within positions 18-23 of the antisense strand (counting from the 5′-end of the antisense strand). The RNAi agent also comprises a 5′-PS₂ and a targeting ligand. In one embodiment, the 5′-PS₂ is at the 5′-end of the antisense strand, and the targeting ligand is at the 3′-end of the sense strand.

[0459] In one embodiment, B1 is 2′-OMe or 2′-F, n¹ is 8, T1 is 2′F, n² is 3, B2 is 2′-OMe, n³ is 7, n⁴ is 0, B3 is 2′-OMe, n⁵ is 3, B1′ is 2′-OMe or 2′-F, q¹ is 9, T1′ is 2′-F, q² is 1, B2′ is 2′-OMe or 2′-F, q³ is 4, q4 is 0, B3′ is 2′-OMe or 2′-F, q⁵ is 7, T3′ is 2′-F, q⁶ is 1, B4′ is 2′-F, and q⁷ is 1; with two phosphorothioate internucleotide linkage modifications within position 1-5 of the sense strand (counting from the 5′-end of the sense strand), and two phosphorothioate internucleotide linkage modifications at positions 1 and 2 and two phosphorothioate internucleotide linkage modifications within positions 18-23 of the antisense strand (counting from the 5′-end of the antisense strand). The RNAi agent also comprises a 5′-deoxy-5′-C-malonyl and a targeting ligand. In one embodiment, the 5′-deoxy-5′-C-malonyl is at the 5′-end of the antisense strand, and the targeting ligand is at the 3′-end of the sense strand.

[0460] In a particular embodiment, an RNAi agent of the present invention comprises:
[0461] (a) a sense strand having:
   [0462] (i) a length of 21 nucleotides;
   [0463] (ii) an ASGPR ligand attached to the 3′-end, wherein said ASGPR ligand comprises three GalNAc derivatives attached through a trivalent branched linker; and
   [0464] (iii) 2′-F modifications at positions 1, 3, 5, 7, 9 to 11, 13, 17, 19, and 21, and 2′-OMe modifications at positions 2, 4, 6, 8, 12, 14 to 16, 18, and 20 (counting from the 5′ end);
[0465] and
[0466] (b) an antisense strand having:
   [0467] (i) a length of 23 nucleotides;
   [0468] (ii) 2′-OMe modifications at positions 1, 3, 5, 9, 11 to 13, 15, 17, 19, 21, and 23, and 2′F modifications at positions 2, 4, 6 to 8, 10, 14, 16, 18, 20, and 22 (counting from the 5′ end); and
   [0469] (iii) phosphorothioate internucleotide linkages between nucleotide positions 21 and 22, and between nucleotide positions 22 and 23 (counting from the 5′ end);
[0470] wherein the dsRNA agents have a two nucleotide overhang at the 3′-end of the antisense strand, and a blunt end at the 5′-end of the antisense strand.

[0471] In another particular embodiment, an RNAi agent of the present invention comprises:
[0472] (a) a sense strand having:
[0473] (i) a length of 21 nucleotides;
[0474] (ii) an ASGPR ligand attached to the 3′-end, wherein said ASGPR ligand comprises three GalNAc derivatives attached through a trivalent branched linker;
[0475] (iii) 2′-F modifications at positions 1, 3, 5, 7, 9 to 11, 13, 15, 17, 19, and 21, and 2′-OMe modifications at positions 2, 4, 6, 8, 12, 14, 16, 18, and 20 (counting from the 5′ end);
[0476] and
[0477] (iv) phosphorothioate internucleotide linkages between nucleotide positions 1 and 2, and between nucleotide positions 2 and 3 (counting from the 5′ end);
[0478] and
[0479] (b) an antisense strand having:
[0480] (i) a length of 23 nucleotides;
[0481] (ii) 2′-OMe modifications at positions 1, 3, 5, 7, 9, 11 to 13, 15, 17, 19, and 21 to 23, and 2′F modifications at positions 2, 4, 6, 8, 10, 14, 16, 18, and 20 (counting from the 5′ end); and
[0482] (iii) phosphorothioate internucleotide linkages between nucleotide positions 1 and 2, between nucleotide positions 2 and 3, between nucleotide positions 21 and 22, and between nucleotide positions 22 and 23 (counting from the 5′ end);
   wherein the RNAi agents have a two nucleotide overhang at the 3′-end of the antisense strand, and a blunt end at the 5′-end of the antisense strand.

[0483] In another particular embodiment, a RNAi agent of the present invention comprises:
[0484] (a) a sense strand having:
   [0485] (i) a length of 21 nucleotides;
   [0486] (ii) an ASGPR ligand attached to the 3′-end, wherein said ASGPR ligand comprises three GalNAc derivatives attached through a trivalent branched linker;
   [0487] (iii) 2′-OMe modifications at positions 1 to 6, 8, 10, and 12 to 21, 2′-F modifications at positions 7, and 9, and a deoxy-nucleotide (e.g. dT) at position 11 (counting from the 5′ end); and
   [0488] (iv) phosphorothioate internucleotide linkages between nucleotide positions 1 and 2, and between nucleotide positions 2 and 3 (counting from the 5′ end);
[0489] and
[0490] (b) an antisense strand having:
   [0491] (i) a length of 23 nucleotides;
   [0492] (ii) 2′-OMe modifications at positions 1, 3, 7, 9, 11, 13, 15, 17, and 19 to 23, and 2′-F modifications at positions 2, 4 to 6, 8, 10, 12, 14, 16, and 18 (counting from the 5′ end); and
   [0493] (iii) phosphorothioate internucleotide linkages between nucleotide positions 1 and 2, between nucleotide positions 2 and 3, between nucleotide positions 21 and 22, and between nucleotide positions 22 and 23 (counting from the 5′ end);
      wherein the RNAi agents have a two nucleotide overhang at the 3′-end of the antisense strand, and a blunt end at the 5′-end of the antisense strand.

[0494] In another particular embodiment, a RNAi agent of the present invention comprises:
[0495] (a) a sense strand having:
   [0496] (i) a length of 21 nucleotides;
   [0497] (ii) an ASGPR ligand attached to the 3′-end, wherein said ASGPR ligand comprises three GalNAc derivatives attached through a trivalent branched linker;
   [0498] (iii) 2′-OMe modifications at positions 1 to 6, 8, 10, 12, 14, and 16 to 21, and 2′-F modifications at positions 7, 9, 11, 13, and 15; and
   [0499] (iv) phosphorothioate internucleotide linkages between nucleotide positions 1 and 2, and between nucleotide positions 2 and 3 (counting from the 5′ end);
[0500] and
[0501] (b) an antisense strand having:
   [0502] (i) a length of 23 nucleotides;
   [0503] (ii) 2′-OMe modifications at positions 1, 5, 7, 9, 11, 13, 15, 17, 19, and 21 to 23, and 2′-F modifications at positions 2 to 4, 6, 8, 10, 12, 14, 16, 18, and 20 (counting from the 5′ end); and
   [0504] (iii) phosphorothioate internucleotide linkages between nucleotide positions 1 and 2, between nucleotide positions 2 and 3, between nucleotide positions 21 and 22, and between nucleotide positions 22 and 23 (counting from the 5′ end);
      wherein the RNAi agents have a two nucleotide overhang at the 3′-end of the antisense strand, and a blunt end at the 5′-end of the antisense strand.

[0505] In another particular embodiment, a RNAi agent of the present invention comprises:
[0506] (a) a sense strand having:
   [0507] (i) a length of 21 nucleotides;
   [0508] (ii) an ASGPR ligand attached to the 3′-end, wherein said ASGPR ligand comprises three GalNAc derivatives attached through a trivalent branched linker;
   [0509] (iii) 2′-OMe modifications at positions 1 to 9, and 12 to 21, and 2′-F modifications at positions 10, and 11; and
   [0510] (iv) phosphorothioate internucleotide linkages between nucleotide positions 1 and 2, and between nucleotide positions 2 and 3 (counting from the 5′ end);
[0511] and
[0512] (b) an antisense strand having:
   [0513] (i) a length of 23 nucleotides;
   [0514] (ii) 2′-OMe modifications at positions 1, 3, 5, 7, 9, 11 to 13, 15, 17, 19, and 21 to 23, and 2′-F modifications at positions 2, 4, 6, 8, 10, 14, 16, 18, and 20 (counting from the 5′ end); and
   [0515] (iii) phosphorothioate internucleotide linkages between nucleotide positions 1 and 2, between nucleotide positions 2 and 3, between nucleotide positions 21 and 22, and between nucleotide positions 22 and 23 (counting from the 5′ end);
      wherein the RNAi agents have a two nucleotide overhang at the 3′-end of the antisense strand, and a blunt end at the 5′-end of the antisense strand.

[0516] In another particular embodiment, a RNAi agent of the present invention comprises:
[0517] (a) a sense strand having:
   [0518] (i) a length of 21 nucleotides;
   [0519] (ii) an ASGPR ligand attached to the 3′-end, wherein said ASGPR ligand comprises three GalNAc derivatives attached through a trivalent branched linker;
   [0520] (iii) 2′-F modifications at positions 1, 3, 5, 7, 9 to 11, and 13, and 2′-OMe modifications at positions 2, 4, 6, 8, 12, and 14 to 21; and
   [0521] (iv) phosphorothioate internucleotide linkages between nucleotide positions 1 and 2, and between nucleotide positions 2 and 3 (counting from the 5′ end);
[0522] and
[0523] (b) an antisense strand having:
   [0524] (i) a length of 23 nucleotides;
   [0525] (ii) 2′-OMe modifications at positions 1, 3, 5 to 7, 9, 11 to 13, 15, 17 to 19, and 21 to 23, and 2′-F modifications at positions 2, 4, 8, 10, 14, 16, and 20 (counting from the 5′ end); and
   [0526] (iii) phosphorothioate internucleotide linkages between nucleotide positions 1 and 2, between nucleotide positions 2 and 3, between nucleotide positions 21 and 22, and between nucleotide positions 22 and 23 (counting from the 5′ end);
      wherein the RNAi agents have a two nucleotide overhang at the 3′-end of the antisense strand, and a blunt end at the 5′-end of the antisense strand.

[0527] In another particular embodiment, a RNAi agent of the present invention comprises: (a) a sense strand having:
[0528] (i) a length of 21 nucleotides;
   [0529] (ii) an ASGPR ligand attached to the 3′-end, wherein said ASGPR ligand comprises three GalNAc derivatives attached through a trivalent branched linker;
   [0530] (iii) 2′-OMe modifications at positions 1, 2, 4, 6, 8, 12, 14, 15, 17, and 19 to 21, and 2′-F modifications at positions 3, 5, 7, 9 to 11, 13, 16, and 18; and
   [0531] (iv) phosphorothioate internucleotide linkages between nucleotide positions 1 and 2, and between nucleotide positions 2 and 3 (counting from the 5′ end);
[0532] and
[0533] (b) an antisense strand having:
   [0534] (i) a length of 25 nucleotides;
   [0535] (ii) 2′-OMe modifications at positions 1, 4, 6, 7, 9, 11 to 13, 15, 17, and 19 to 23, 2′-F modifications at positions 2, 3, 5, 8, 10, 14, 16, and 18, and deoxy-nucleotides (e.g. dT) at positions 24 and 25 (counting from the 5′ end); and
   [0536] (iii) phosphorothioate internucleotide linkages between nucleotide positions 1 and 2, between nucleotide positions 2 and 3, between nucleotide positions 21 and 22, and between nucleotide positions 22 and 23 (counting from the 5′ end);
      wherein the RNAi agents have a four nucleotide overhang at the 3′-end of the antisense strand, and a blunt end at the 5′-end of the antisense strand.

[0537] In another particular embodiment, a RNAi agent of the present invention comprises:
[0538] (a) a sense strand having:
   [0539] (i) a length of 21 nucleotides;
   [0540] (ii) an ASGPR ligand attached to the 3′-end, wherein said ASGPR ligand comprises three GalNAc derivatives attached through a trivalent branched linker;
   [0541] (iii) 2′-OMe modifications at positions 1 to 6, 8, and 12 to 21, and 2′-F modifications at positions 7, and 9 to 11; and
   [0542] (iv) phosphorothioate internucleotide linkages between nucleotide positions 1 and 2, and between nucleotide positions 2 and 3 (counting from the 5′ end);
[0543] and
[0544] (b) an antisense strand having:
   [0545] (i) a length of 23 nucleotides;
   [0546] (ii) 2′-OMe modifications at positions 1, 3 to 5, 7, 8, 10 to 13, 15, and 17 to 23, and 2′-F modifications at positions 2, 6, 9, 14, and 16 (counting from the 5′ end); and
   [0547] (iii) phosphorothioate internucleotide linkages between nucleotide positions 1 and 2, between nucleotide positions 2 and 3, between nucleotide positions 21 and 22, and between nucleotide positions 22 and 23 (counting from the 5′ end);
      wherein the RNAi agents have a two nucleotide overhang at the 3′-end of the antisense strand, and a blunt end at the 5′-end of the antisense strand.

[0548] In another particular embodiment, a RNAi agent of the present invention comprises:
[0549] (a) a sense strand having:
   [0550] (i) a length of 21 nucleotides;
   [0551] (ii) an ASGPR ligand attached to the 3′-end, wherein said ASGPR ligand comprises three GalNAc derivatives attached through a trivalent branched linker;
   [0552] (iii) 2′-OMe modifications at positions 1 to 6, 8, and 12 to 21, and 2′-F modifications at positions 7, and 9 to 11; and
   [0553] (iv) phosphorothioate internucleotide linkages between nucleotide positions 1 and 2, and between nucleotide positions 2 and 3 (counting from the 5′ end);
[0554] and
[0555] (b) an antisense strand having:
   [0556] (i) a length of 23 nucleotides;
   [0557] (ii) 2′-OMe modifications at positions 1, 3 to 5, 7, 10 to 13, 15, and 17 to 23, and 2′-F modifications at positions 2, 6, 8, 9, 14, and 16 (counting from the 5′ end); and
   [0558] (iii) phosphorothioate internucleotide linkages between nucleotide positions 1 and 2, between nucleotide positions 2 and 3, between nucleotide positions 21 and 22, and between nucleotide positions 22 and 23 (counting from the 5′ end);
      wherein the RNAi agents have a two nucleotide overhang at the 3′-end of the antisense strand, and a blunt end at the 5′-end of the antisense strand.

[0559] In another particular embodiment, a RNAi agent of the present invention comprises:
[0560] (a) a sense strand having:
   [0561] (i) a length of 19 nucleotides;
   [0562] (ii) an ASGPR ligand attached to the 3′-end, wherein said ASGPR ligand comprises three GalNAc derivatives attached through a trivalent branched linker;
   [0563] (iii) 2′-OMe modifications at positions 1 to 4, 6, and 10 to 19, and 2′-F modifications at positions 5, and 7 to 9; and
   [0564] (iv) phosphorothioate internucleotide linkages between nucleotide positions 1 and 2, and between nucleotide positions 2 and 3 (counting from the 5′ end);
[0565] and
[0566] (b) an antisense strand having:
   [0567] (i) a length of 21 nucleotides;
   [0568] (ii) 2′-OMe modifications at positions 1, 3 to 5, 7, 10 to 13, 15, and 17 to 21, and 2′-F modifications at positions 2, 6, 8, 9, 14, and 16 (counting from the 5′ end); and
   [0569] (iii) phosphorothioate internucleotide linkages between nucleotide positions 1 and 2, between nucleotide positions 2 and 3, between nucleotide positions 19 and 20, and between nucleotide positions 20 and 21 (counting from the 5′ end);
      wherein the RNAi agents have a two nucleotide overhang at the 3′-end of the antisense strand, and a blunt end at the 5′-end of the antisense strand.

[0570] In certain embodiments, the iRNA for use in the methods of the invention is an agent selected from agents listed in any one of Tables 2, 3, 5, or 6. These agents may further comprise a ligand.

### III. iRNAs Conjugated to Ligands

[0571] Another modification of the RNA of an iRNA of the invention involves chemically linking to the iRNA one or more ligands, moieties or conjugates that enhance the activity, cellular distribution, or cellular uptake of the iRNA e.g., into a cell. Such moieties include but are not limited to lipid moieties such as a cholesterol moiety (Letsinger et al., Proc. Natl. Acid. Sci. USA, 1989, 86: 6553-6556). In other embodiments, the ligand is cholic acid (Manoharan et al., Biorg. Med. Chem. Let., 1994, 4:1053-1060), a thioether, e.g., beryl-S-tritylthiol (Manoharan et al., Ann. N. Y. Acad. Sci., 1992, 660:306-309; Manoharan et al., Biorg. Med. Chem. Let., 1993, 3:2765-2770), a thiocholesterol (Oberhauser et al., Nucl. Acids Res., 1992, 20:533-538), an aliphatic chain, e.g., dodecandiol or undecyl residues (Saison-Behmoaras et al., EMBO J, 1991, 10:1111-1118; Kabanov et al., FEBS Lett., 1990, 259:327-330; Svinarchuk et al., Biochimie, 1993, 75:49-54), a phospholipid, e.g., di-hexadecyl-rac-glycerol or triethyl-ammonium 1,2-di-O-hexadecyl-rac-glycero-3-phosphonate (Manoharan et al., Tetrahedron Lett., 1995, 36:3651-3654; Shea et al., Nucl. Acids Res., 1990, 18:3777-3783), a polyamine or a polyethylene glycol chain (Manoharan et al., Nucleosides & Nucleotides, 1995, 14:969-973), or adamantane acetic acid (Manoharan et al., Tetrahedron Lett., 1995, 36:3651-3654), a palmityl moiety (Mishra et al., Biochim. Biophys. Acta, 1995, 1264:229-237), or an octadecylamine or hexylamino-carbonyloxycholesterol moiety (Crooke et al., J. Pharmacol. Exp. Ther., 1996, 277:923-937).

[0572] In certain embodiments, a ligand alters the distribution, targeting, or lifetime of an iRNA agent into which it is incorporated. In some embodiments a ligand provides an enhanced affinity for a selected target, e.g., molecule, cell or cell type, compartment, e.g., a cellular or organ compartment, tissue, organ or region of the body, as, e.g., compared to a species absent such a ligand. In some embodiments, ligands do not take part in duplex pairing in a duplexed nucleic acid.

[0573] Ligands can include a naturally occurring substance, such as a protein (e.g., human serum albumin (HSA), low-density lipoprotein (LDL), or globulin); carbohydrate (e.g., a dextran, pullulan, chitin, chitosan, inulin, cyclodextrin, N-acetylglucosamine, N-acetylgalactosamine, or hyaluronic acid); or a lipid. The ligand can also be a recombinant or synthetic molecule, such as a synthetic polymer, e.g., a synthetic polyamino acid. Examples of polyamino acids include polyamino acid is a polylysine (PLL), poly L-aspartic acid, poly L-glutamic acid, styrene-maleic acid anhydride copolymer, poly(L-lactide-co-glycolide) copolymer, divinyl ether-maleic anhydride copolymer, N-(2-hydroxypropyl)methacrylamide copolymer (HMPA), polyethylene glycol (PEG), polyvinyl alcohol (PVA), polyurethane, poly(2-ethylacryllic acid), N-isopropylacrylamide polymers, or polyphosphazine. Example of polyamines include: polyethylenimine, polylysine (PLL), spermine, spermidine, polyamine, pseudopeptide-polyamine, peptidomimetic polyamine, dendrimer polyamine, arginine, amidine, protamine, cationic lipid, cationic porphyrin, quaternary salt of a polyamine, or an alpha helical peptide.

[0574] Ligands can also include targeting groups, e.g., a cell or tissue targeting agent, e.g., a lectin, glycoprotein, lipid or protein, e.g., an antibody, that binds to a specified cell type such as a kidney cell. A targeting group can be a thyrotropin, melanotropin, lectin, glycoprotein, surfactant protein A, Mucin carbohydrate, multivalent lactose, multivalent galactose, N-acetyl-galactosamine, N-acetyl-glucosamine multivalent mannose, multivalent fucose, glycosylated polyaminoacids, multivalent galactose, transferrin, bisphosphonate, polyglutamate, polyaspartate, a lipid, cholesterol, a steroid, bile acid, folate, vitamin B12, vitamin A, biotin, or an RGD peptide or RGD peptide mimetic. In certain embodiments, the ligand is a multivalent galactose, e.g., an N-acetyl-galactosamine.

[0575] Other examples of ligands include dyes, intercalating agents (e.g. acridines), cross-linkers (e.g. psoralene, mitomycin C), porphyrins (TPPC4, texaphyrin, Sapphyrin), polycyclic aromatic hydrocarbons (e.g., phenazine, dihydrophenazine), artificial endonucleases (e.g. EDTA), lipophilic molecules, e.g., cholesterol, cholic acid, adamantane acetic acid, 1-pyrene butyric acid, dihydrotestosterone, 1,3-Bis-O(hexadecyl)glycerol, geranyloxyhexyl group, hexadecylglycerol, borneol, menthol, 1,3-propanediol, heptadecyl group, palmitic acid, myristic acid, O3-(oleoyl)lithocholic acid, O3-(oleoyl)cholenic acid, dimethoxytrityl, or phenoxazine) and peptide conjugates (e.g., antennapedia peptide, Tat peptide), alkylating agents, phosphate, amino, mercapto, PEG (e.g., PEG-40K), MPEG, [MPEG]₂, polyamino, alkyl, substituted alkyl, radiolabeled markers, enzymes, haptens (e.g. biotin), transport/absorption facilitators (e.g., aspirin, vitamin E, folic acid), synthetic ribonucleases (e.g., imidazole, bisimidazole, histamine, imidazole clusters, acridine-imidazole conjugates, Eu3+ complexes of tetraazamacrocycles), dinitrophenyl, HRP, or AP.

[0576] Ligands can be proteins, e.g., glycoproteins, or peptides, e.g., molecules having a specific affinity for a co-ligand, or antibodies e.g., an antibody, that binds to a specified cell type such as a hepatic cell. Ligands can also include hormones and hormone receptors. They can also include non-peptidic species, such as lipids, lectins, carbohydrates, vitamins, cofactors, multivalent lactose, multivalent galactose, N-acetyl-galactosamine, N-acetyl-glucosamine multivalent mannose, or multivalent fucose. The ligand can be, for example, a lipopolysaccharide, an activator of p38 MAP kinase, or an activator of NF-κB.

[0577] The ligand can be a substance, e.g., a drug, which can increase the uptake of the iRNA agent into the cell, for example, by disrupting the cell's cytoskeleton, e.g., by disrupting the cell's microtubules, microfilaments, or intermediate filaments. The drug can be, for example, taxol, vincristine, vinblastine, cytochalasin, nocodazole, japlakinolide, latrunculin A, phalloidin, swinholide A, indanocine, or myoservin.

[0578] In some embodiments, a ligand attached to an iRNA as described herein acts as a pharmacokinetic modulator (PK modulator). PK modulators include lipophiles, bile acids, steroids, phospholipid analogues, peptides, protein binding agents, PEG, vitamins, etc. Exemplary PK modulators include, but are not limited to, cholesterol, fatty acids, cholic acid, lithocholic acid, dialkylglycerides, diacylglyceride, phospholipids, sphingolipids, naproxen, ibuprofen, vitamin E, biotin. Oligonucleotides that comprise a number of phosphorothioate linkages are also known to bind to serum protein, thus short oligonucleotides, e.g., oligonucleotides of about 5 bases, 10 bases, 15 bases, or 20 bases, comprising multiple of phosphorothioate linkages in the backbone are also amenable to the present invention as ligands (e.g. as PK modulating ligands). In addition, aptamers that bind serum components (e.g. serum proteins) are also suitable for use as PK modulating ligands in the embodiments described herein.

[0579] Ligand-conjugated iRNAs of the invention may be synthesized by the use of an oligonucleotide that bears a pendant reactive functionality, such as that derived from the attachment of a linking molecule onto the oligonucleotide (described below). This reactive oligonucleotide may be reacted directly with commercially-available ligands, ligands that are synthesized bearing any of a variety of protecting groups, or ligands that have a linking moiety attached thereto.

[0580] The oligonucleotides used in the conjugates of the present invention may be conveniently and routinely made through the well-known technique of solid-phase synthesis. Equipment for such synthesis is sold by several vendors including, for example, Applied Biosystems® (Foster City, Calif). Any other methods for such synthesis known in the art may additionally or alternatively be employed. It is also known to use similar techniques to prepare other oligonucleotides, such as the phosphorothioates and alkylated derivatives.

[0581] In the ligand-conjugated iRNAs and ligand-molecule bearing sequence-specific linked nucleosides of the present invention, the oligonucleotides and oligonucleosides may be assembled on a suitable DNA synthesizer utilizing standard nucleotide or nucleoside precursors, or nucleotide or nucleoside conjugate precursors that already bear the linking moiety, ligand-nucleotide or nucleoside-conjugate precursors that already bear the ligand molecule, or non-nucleoside ligand-bearing building blocks.

[0582] When using nucleotide-conjugate precursors that already bear a linking moiety, the synthesis of the sequence-specific linked nucleosides is typically completed, and the ligand molecule is then reacted with the linking moiety to form the ligand-conjugated oligonucleotide. In some embodiments, the oligonucleotides or linked nucleosides of the present invention are synthesized by an automated synthesizer using phosphoramidites derived from ligand-nucleoside conjugates in addition to the standard phosphoramidites and non-standard phosphoramidites that are commercially available and routinely used in oligonucleotide synthesis.

### A. Lipid Conjugates

[0583] In certain embodiments, the ligand or conjugate is a lipid or lipid-based molecule.

[0584] In one embodiment, such a lipid or lipid-based molecule binds a serum protein, e.g., human serum albumin (HSA). An HSA binding ligand allows for distribution of the conjugate to a target tissue, e.g., a non-kidney target tissue of the body. For example, the target tissue can be the liver, including parenchymal cells of the liver. Other molecules that can bind HSA can also be used as ligands. For example, naproxen or aspirin can be used. A lipid or lipid-based ligand can (a) increase resistance to degradation of the conjugate, (b) increase targeting or transport into a target cell or cell membrane, or (c) can be used to adjust binding to a serum protein, e.g., HSA.

[0585] A lipid based ligand can be used to inhibit, e.g., control the binding of the conjugate to a target tissue. For example, a lipid or lipid-based ligand that binds to HSA more strongly will be less likely to be targeted to the kidney and therefore less likely to be cleared from the body. A lipid or lipid-based ligand that binds to HSA less strongly can be used to target the conjugate to the kidney.

[0586] In certain embodiments, the lipid based ligand binds HSA. In one embodiment, it binds HSA with a sufficient affinity such that the conjugate will be distributed to a non-kidney tissue. However, it is preferred that the affinity not be so strong that the HSA-ligand binding cannot be reversed.

[0587] In other embodiments, the lipid based ligand binds HSA weakly or not at all. In one embodiment, the conjugate will be distributed to the kidney. Other moieties that target to kidney cells can also be used in place of, or in addition to, the lipid based ligand.

[0588] In another aspect, the ligand is a moiety, e.g., a vitamin, which is taken up by a target cell, e.g., a proliferating cell. These are particularly useful for treating disorders characterized by unwanted cell proliferation, e.g., of the malignant or non-malignant type, e.g., cancer cells. Exemplary vitamins include vitamin A, E, and K. Other exemplary vitamins include are B vitamin, e.g., folic acid, B12, riboflavin, biotin, pyridoxal or other vitamins or nutrients taken up by target cells such as liver cells. Also included are HSA and low density lipoprotein (LDL).

### B. Cell Permeation Agents

[0589] In another aspect, the ligand is a cell-permeation agent, such as, a helical cell-permeation agent. In one embodiment, the agent is amphipathic. An exemplary agent is a peptide such as tat or antennopedia. If the agent is a peptide, it can be modified, including a peptidylmimetic, invertomers, non-peptide or pseudo-peptide linkages, and use of D-amino acids. In one embodiment, the helical agent is an alpha-helical agent, which has a lipophilic and a lipophobic phase.

[0590] The ligand can be a peptide or peptidomimetic. A peptidomimetic (also referred to herein as an oligopeptidomimetic) is a molecule capable of folding into a defined three-dimensional structure similar to a natural peptide. The attachment of peptide and peptidomimetics to iRNA agents can affect pharmacokinetic distribution of the iRNA, such as by enhancing cellular recognition and absorption. The peptide or peptidomimetic moiety can be about 5-50 amino acids long, e.g., about 5, 10, 15, 20, 25, 30, 35, 40, 45, or 50 amino acids long.

[0591] A peptide or peptidomimetic can be, for example, a cell permeation peptide, cationic peptide, amphipathic peptide, or hydrophobic peptide (e.g., consisting primarily of Tyr, Trp, or Phe). The peptide moiety can be a dendrimer peptide, constrained peptide or crosslinked peptide. In another alternative, the peptide moiety can include a hydrophobic membrane translocation sequence (MTS). An exemplary hydrophobic MTS-containing peptide is RFGF having the amino acid sequence AAVALLPAVLLALLAP (SEQ ID NO: 14). An RFGF analogue (e.g., amino acid sequence AALLPVLLAAP (SEQ ID NO: 15) containing a hydrophobic MTS can also be a targeting moiety. The peptide moiety can be a “delivery” peptide, which can carry large polar molecules including peptides, oligonucleotides, and protein across cell membranes. For example, sequences from the HIV Tat protein (GRKKRRQRRRPPQ (SEQ ID NO: 16) and the Drosophila Antennapedia protein (RQIKIWFQNRRMKWKK (SEQ ID NO: 17) have been found to be capable of functioning as delivery peptides. A peptide or peptidomimetic can be encoded by a random sequence of DNA, such as a peptide identified from a phage-display library, or one-bead-one-compound (OBOC) combinatorial library (Lam et al., Nature, 354:82-84, 1991). Examples of a peptide or peptidomimetic tethered to a dsRNA agent via an incorporated monomer unit for cell targeting purposes is an arginine-glycine-aspartic acid (RGD)-peptide, or RGD mimic. A peptide moiety can range in length from about 5 amino acids to about 40 amino acids. The peptide moieties can have a structural modification, such as to increase stability or direct conformational properties. Any of the structural modifications described below can be utilized.

[0592] An RGD peptide for use in the compositions and methods of the invention may be linear or cyclic, and may be modified, e.g., glycosylated or methylated, to facilitate targeting to a specific tissue(s). RGD-containing peptides and peptidiomimemtics may include D-amino acids, as well as synthetic RGD mimics. In addition to RGD, one can use other moieties that target the integrin ligand, e.g., PECAM-1 or VEGF.

[0593] A “cell permeation peptide” is capable of permeating a cell, e.g., a microbial cell, such as a bacterial or fungal cell, or a mammalian cell, such as a human cell. A microbial cell-permeating peptide can be, for example, an a-helical linear peptide (e.g., LL-37 or Ceropin P1), a disulfide bond-containing peptide (e.g., α-defensin, β-defensin or bactenecin), or a peptide containing only one or two dominating amino acids (e.g., PR-39 or indolicidin). A cell permeation peptide can also include a nuclear localization signal (NLS). For example, a cell permeation peptide can be a bipartite amphipathic peptide, such as MPG, which is derived from the fusion peptide domain of HIV-1 gp41 and the NLS of SV40 large T antigen (Simeoni et al., Nucl. Acids Res. 31:2717-2724, 2003).

### C. Carbohydrate Conjugates

[0594] In some embodiments of the compositions and methods of the invention, an iRNA further comprises a carbohydrate. The carbohydrate conjugated iRNA is advantageous for the in vivo delivery of nucleic acids, as well as compositions suitable for in vivo therapeutic use, as described herein. As used herein, “carbohydrate” refers to a compound which is either a carbohydrate per se made up of one or more monosaccharide units having at least 6 carbon atoms (which can be linear, branched or cyclic) with an oxygen, nitrogen or sulfur atom bonded to each carbon atom; or a compound having as a part thereof a carbohydrate moiety made up of one or more monosaccharide units each having at least six carbon atoms (which can be linear, branched or cyclic), with an oxygen, nitrogen or sulfur atom bonded to each carbon atom. Representative carbohydrates include the sugars (mono-, di-, tri-, and oligosaccharides containing from about 4, 5, 6, 7, 8, or 9 monosaccharide units), and polysaccharides such as starches, glycogen, cellulose and polysaccharide gums. Specific monosaccharides include C5 and above (e.g., C5, C6, C7, or C8) sugars; di- and trisaccharides include sugars having two or three monosaccharide units (e.g., C5, C6, C7, or C8).

[0595] In certain embodiments, a carbohydrate conjugate for use in the compositions and methods of the invention is a monosaccharide.

[0596] In certain embodiments, the monosaccharide is an N-acetylgalactosamine (GalNAc). GalNAc conjugates, which comprise one or more N-acetylgalactosamine (GalNAc) derivatives, are described, for example, in U.S. Pat. No. 8,106,022, the entire content of which is hereby incorporated herein by reference. In some embodiments, the GalNAc conjugate serves as a ligand that targets the iRNA to particular cells. In some embodiments, the GalNAc conjugate targets the iRNA to liver cells, e.g., by serving as a ligand for the asialoglycoprotein receptor of liver cells (e.g., hepatocytes).

[0597] In some embodiments, the carbohydrate conjugate comprises one or more GalNAc derivatives. The GalNAc derivatives may be attached via a linker, e.g., a bivalent or trivalent branched linker. In some embodiments the GalNAc conjugate is conjugated to the 3′ end of the sense strand. In some embodiments, the GalNAc conjugate is conjugated to the iRNA agent (e.g., to the 3′ end of the sense strand) via a linker, e.g., a linker as described herein. In some embodiments the GalNAc conjugate is conjugated to the 5′ end of the sense strand. In some embodiments, the GalNAc conjugate is conjugated to the iRNA agent (e.g., to the 5′ end of the sense strand) via a linker, e.g., a linker as described herein.

[0598] In certain embodiments of the invention, the GalNAc or GalNAc derivative is attached to an iRNA agent of the invention via a monovalent linker. In some embodiments, the GalNAc or GalNAc derivative is attached to an iRNA agent of the invention via a bivalent linker. In yet other embodiments of the invention, the GalNAc or GalNAc derivative is attached to an iRNA agent of the invention via a trivalent linker. In other embodiments of the invention, the GalNAc or GalNAc derivative is attached to an iRNA agent of the invention via a tetravalent linker.

[0599] In certain embodiments, the double stranded RNAi agents of the invention comprise one GalNAc or GalNAc derivative attached to the iRNA agent. In certain embodiments, the double stranded RNAi agents of the invention comprise a plurality (e.g., 2, 3, 4, 5, or 6) GalNAc or GalNAc derivatives, each independently attached to a plurality of nucleotides of the double stranded RNAi agent through a plurality of monovalent linkers.

[0600] In some embodiments, for example, when the two strands of an iRNA agent of the invention are part of one larger molecule connected by an uninterrupted chain of nucleotides between the 3′-end of one strand and the 5′-end of the respective other strand forming a hairpin loop comprising, a plurality of unpaired nucleotides, each unpaired nucleotide within the hairpin loop may independently comprise a GalNAc or GalNAc derivative attached via a monovalent linker. The hairpin loop may also be formed by an extended overhang in one strand of the duplex.

[0601] In some embodiments, for example, when the two strands of an iRNA agent of the invention are part of one larger molecule connected by an uninterrupted chain of nucleotides between the 3′-end of one strand and the 5′-end of the respective other strand forming a hairpin loop comprising, a plurality of unpaired nucleotides, each unpaired nucleotide within the hairpin loop may independently comprise a GalNAc or GalNAc derivative attached via a monovalent linker. The hairpin loop may also be formed by an extended overhang in one strand of the duplex.

[0602] In one embodiment, a carbohydrate conjugate for use in the compositions and methods of the invention is selected from the group consisting of

[chemical structure]

[chemical structure]

[chemical structure]

[chemical structure]

[chemical structure]

[chemical structure]

[chemical structure]

[0603] In another embodiment, a carbohydrate conjugate for use in the compositions and methods of the invention is a monosaccharide. In one embodiment, the monosaccharide is an N-acetylgalactosamine, such as

[chemical structure]

[0604] In some embodiments the RNAi agent is attached to the carbohydrate conjugate via a linker as shown in the following schematic wherein X is O or S.

[chemical structure]

[0605] In some embodiments the RNAi agent is conjugated to L96 as defined in Table 1 and shown below:

[chemical structure]

[0606] Another representative carbohydrate conjugate for use in the embodiments described herein includes, but is not limited to,

[chemical structure]

when one of X or Y is an oligonucleotide, the other is a hydrogen.

[0607] In some embodiments, a suitable ligand is a ligand disclosed in WO 2019/055633, the entire contents of which are incorporated herein by reference. In one embodiment the ligand comprises the structure below:

[chemical structure]

[0608] In certain embodiments of the invention, the GalNAc or GalNAc derivative is attached to an iRNA agent of the invention via a monovalent linker. In some embodiments, the GalNAc or GalNAc derivative is attached to an iRNA agent of the invention via a bivalent linker. In yet other embodiments of the invention, the GalNAc or GalNAc derivative is attached to an iRNA agent of the invention via a trivalent linker.

[0609] In one embodiment, the double stranded RNAi agents of the invention comprise one or more GalNAc or GalNAc derivative attached to the iRNA agent. The GalNAc may be attached to any nucleotide via a linker on the sense strand or antisense strand. The GalNac may be attached to the 5′-end of the sense strand, the 3′ end of the sense strand, the 5′-end of the antisense strand, or the 3′-end of the antisense strand. In one embodiment, the GalNAc is attached to the 3′ end of the sense strand, e.g., via a trivalent linker.

[0610] In other embodiments, the double stranded RNAi agents of the invention comprise a plurality (e.g., 2, 3, 4, 5, or 6) GalNAc or GalNAc derivatives, each independently attached to a plurality of nucleotides of the double stranded RNAi agent through a plurality of linkers, e.g., monovalent linkers.

[0611] In some embodiments, for example, when the two strands of an iRNA agent of the invention is part of one larger molecule connected by an uninterrupted chain of nucleotides between the 3′-end of one strand and the 5′-end of the respective other strand forming a hairpin loop comprising, a plurality of unpaired nucleotides, each unpaired nucleotide within the hairpin loop may independently comprise a GalNAc or GalNAc derivative attached via a monovalent linker.

[0612] In some embodiments, the carbohydrate conjugate further comprises one or more additional ligands as described above, such as, but not limited to, a PK modulator or a cell permeation peptide.

[0613] Additional carbohydrate conjugates and linkers suitable for use in the present invention include those described in PCT Publication Nos. WO 2014/179620 and WO 2014/179627, the entire contents of each of which are incorporated herein by reference.

### D. Linkers

[0614] In some embodiments, the conjugate or ligand described herein can be attached to an iRNA oligonucleotide with various linkers that can be cleavable or non-cleavable.

[0615] The term “linker” or “linking group” means an organic moiety that connects two parts of a compound, e.g., covalently attaches two parts of a compound. Linkers typically comprise a direct bond or an atom such as oxygen or sulfur, a unit such as NR8, C(O), C(O)NH, SO, SO₂, SO₂NH or a chain of atoms, such as, but not limited to, substituted or unsubstituted alkyl, substituted or unsubstituted alkenyl, substituted or unsubstituted alkynyl, arylalkyl, arylalkenyl, arylalkynyl, heteroarylalkyl, heteroarylalkenyl, heteroarylalkynyl, heterocyclylalkyl, heterocyclylalkenyl, heterocyclylalkynyl, aryl, heteroaryl, heterocyclyl, cycloalkyl, cycloalkenyl, alkylarylalkyl, alkylarylalkenyl, alkylarylalkynyl, alkenylarylalkyl, alkenylarylalkenyl, alkenylarylalkynyl, alkynylarylalkyl, alkynylarylalkenyl, alkynylarylalkynyl, alkylheteroarylalkyl, alkylheteroarylalkenyl, alkylheteroarylalkynyl, alkenylheteroarylalkyl, alkenylheteroarylalkenyl, alkenylheteroarylalkynyl, alkynylheteroarylalkyl, alkynylheteroarylalkenyl, alkynylheteroarylalkynyl, alkylheterocyclylalkyl, alkylheterocyclylalkenyl, alkylhererocyclylalkynyl, alkenylheterocyclylalkyl, alkenylheterocyclylalkenyl, alkenylheterocyclylalkynyl, alkynylheterocyclylalkyl, alkynylheterocyclylalkenyl, alkynylheterocyclylalkynyl, alkylaryl, alkenylaryl, alkynylaryl, alkylheteroaryl, alkenylheteroaryl, alkynylhereroaryl, which one or more methylenes can be interrupted or terminated by O, S, S(O), SO₂, N(R8), C(O), substituted or unsubstituted aryl, substituted or unsubstituted heteroaryl, or substituted or unsubstituted heterocyclic; where R8 is hydrogen, acyl, aliphatic, or substituted aliphatic. In one embodiment, the linker is about 1-24 atoms, 2-24, 3-24, 4-24, 5-24, 6-24, 6-18, 7-18, 8-18, 7-17, 8-17, 6-16, 7-17, or 8-16 atoms.

[0616] A cleavable linking group is one which is sufficiently stable outside the cell, but which upon entry into a target cell is cleaved to release the two parts the linker is holding together. In an exemplary embodiment, the cleavable linking group is cleaved at least about 10 times, 20, times, 30 times, 40 times, 50 times, 60 times, 70 times, 80 times, 90 times, or more, or at least 100 times faster in a target cell or under a first reference condition (which can, e.g., be selected to mimic or represent intracellular conditions) than in the blood of a subject, or under a second reference condition (which can, e.g., be selected to mimic or represent conditions found in the blood or serum).

[0617] Cleavable linking groups are susceptible to cleavage agents, e.g., pH, redox potential, or the presence of degradative molecules. Generally, cleavage agents are more prevalent or found at higher levels or activities inside cells than in serum or blood. Examples of such degradative agents include: redox agents which are selected for particular substrates or which have no substrate specificity, including, e.g., oxidative or reductive enzymes or reductive agents such as mercaptans, present in cells, that can degrade a redox cleavable linking group by reduction; esterases; endosomes or agents that can create an acidic environment, e.g., those that result in a pH of five or lower; enzymes that can hydrolyze or degrade an acid cleavable linking group by acting as a general acid, peptidases (which can be substrate specific), and phosphatases.

[0618] A cleavable linkage group, such as a disulfide bond can be susceptible to pH. The pH of human serum is 7.4, while the average intracellular pH is slightly lower, ranging from about 7.1-7.3. Endosomes have a more acidic pH, in the range of 5.5-6.0, and lysosomes have an even more acidic pH at around 5.0. Some linkers will have a cleavable linking group that is cleaved at a selected pH, thereby releasing a cationic lipid from the ligand inside the cell, or into the desired compartment of the cell.

[0619] A linker can include a cleavable linking group that is cleavable by a particular enzyme. The type of cleavable linking group incorporated into a linker can depend on the cell to be targeted. For example, a liver-targeting ligand can be linked to a cationic lipid through a linker that includes an ester group. Liver cells are rich in esterases, and therefore the linker will be cleaved more efficiently in liver cells than in cell types that are not esterase-rich. Other cell-types rich in esterases include cells of the lung, renal cortex, and testis.

[0620] Linkers that contain peptide bonds can be used when targeting cell types rich in peptidases, such as liver cells and synoviocytes.

[0621] In general, the suitability of a candidate cleavable linking group can be evaluated by testing the ability of a degradative agent (or condition) to cleave the candidate linking group. It will also be desirable to also test the candidate cleavable linking group for the ability to resist cleavage in the blood or when in contact with other non-target tissue. Thus, one can determine the relative susceptibility to cleavage between a first and a second condition, where the first is selected to be indicative of cleavage in a target cell and the second is selected to be indicative of cleavage in other tissues or biological fluids, e.g., blood or serum. The evaluations can be carried out in cell free systems, in cells, in cell culture, in organ or tissue culture, or in whole animals. It can be useful to make initial evaluations in cell-free or culture conditions and to confirm by further evaluations in whole animals. In certain embodiments, useful candidate compounds are cleaved at least about 2, 4, 10, 20, 30, 40, 50, 60, 70, 80, 90, or 100 times faster in the cell (or under in vitro conditions selected to mimic intracellular conditions) as compared to blood or serum (or under in vitro conditions selected to mimic extracellular conditions).

i. Redox Cleavable Linking Groups

[0622] In certain embodiments, a cleavable linking group is a redox cleavable linking group that is cleaved upon reduction or oxidation. An example of reductively cleavable linking group is a disulphide linking group (—S—S—). To determine if a candidate cleavable linking group is a suitable “reductively cleavable linking group,” or for example is suitable for use with a particular iRNA moiety and particular targeting agent one can look to methods described herein. For example, a candidate can be evaluated by incubation with dithiothreitol (DTT), or other reducing agent using reagents know in the art, which mimic the rate of cleavage which would be observed in a cell, e.g., a target cell. The candidates can also be evaluated under conditions which are selected to mimic blood or serum conditions. In one, candidate compounds are cleaved by at most about 10% in the blood. In other embodiments, useful candidate compounds are degraded at least about 2, 4, 10, 20, 30, 40, 50, 60, 70, 80, 90, or about 100 times faster in the cell (or under in vitro conditions selected to mimic intracellular conditions) as compared to blood (or under in vitro conditions selected to mimic extracellular conditions). The rate of cleavage of candidate compounds can be determined using standard enzyme kinetics assays under conditions chosen to mimic intracellular media and compared to conditions chosen to mimic extracellular media.

ii. Phosphate-Based Cleavable Linking Groups

[0623] In other embodiments, a cleavable linker comprises a phosphate-based cleavable linking group. A phosphate-based cleavable linking group is cleaved by agents that degrade or hydrolyze the phosphate group. An example of an agent that cleaves phosphate groups in cells are enzymes such as phosphatases in cells. Examples of phosphate-based linking groups are —O—P(O)(ORk)-O—, —O—P(S)(ORk)-O—, —O—P(S)(SRk)-O—, —S—P(O)(ORk)-O—, —O—P(O)(ORk)-S—, —S—P(O)(ORk)-S—, —O—P(S)(ORk)-S—, —S—P(S)(ORk)-O—, —O—P(O)(Rk)-O—, —O—P(S)(Rk)-O—, —S—P(O)(Rk)-O—, —S—P(S)(Rk)-O—, —S—P(O)(Rk)-S—, —O—P(S)(Rk)-S—, wherein Rk at each occurrence can be, independently, C1-C20 alkyl, C1-C20 haloalkyl, C6-C10 aryl, or C7-C12 aralkyl. Exemplary embodiments include —O—P(O)(OH)—O—, —O—P(S)(OH)—O—, —O—P(S)(SH)—O—, —S—P(O)(OH)—O—, —O—P(O)(OH)—S—, —S—P(O)(OH)—S—O—P(S)(OH)—S—, —S—P(S)(OH)—O—, —O—P(O)(H)—O—, —O—P(S)(H)—O—, —S—P(O)(H)-0, —S—P(S)(H)—O—, —S—P(O)(H)—S—, and —O—P(S)(H)—S—. In certain embodiments a phosphate-based linking group is —O—P(O)(OH)—O—. These candidates can be evaluated using methods analogous to those described above.

iii. Acid Cleavable Linking Groups

[0624] In other embodiments, a cleavable linker comprises an acid cleavable linking group. An acid cleavable linking group is a linking group that is cleaved under acidic conditions. In certain embodiments acid cleavable linking groups are cleaved in an acidic environment with a pH of about 6.5 or lower (e.g., about 6.0, 5.5, 5.0, or lower), or by agents such as enzymes that can act as a general acid. In a cell, specific low pH organelles, such as endosomes and lysosomes can provide a cleaving environment for acid cleavable linking groups. Examples of acid cleavable linking groups include but are not limited to hydrazones, esters, and esters of amino acids. Acid cleavable groups can have the general formula —C═NN—, C(O)O, or —OC(O). An exemplary embodiment is when the carbon attached to the oxygen of the ester (the alkoxy group) is an aryl group, substituted alkyl group, or tertiary alkyl group such as dimethyl pentyl or t-butyl. These candidates can be evaluated using methods analogous to those described above.

iv. Ester-Based Linking Groups

[0625] In other embodiments, a cleavable linker comprises an ester-based cleavable linking group. An ester-based cleavable linking group is cleaved by enzymes such as esterases and amidases in cells. Examples of ester-based cleavable linking groups include, but are not limited to, esters of alkylene, alkenylene and alkynylene groups. Ester cleavable linking groups have the general formula —C(O)O—, or —OC(O)—. These candidates can be evaluated using methods analogous to those described above.

v. Peptide-Based Cleaving Groups

[0626] In yet other embodiments, a cleavable linker comprises a peptide-based cleavable linking group. A peptide-based cleavable linking group is cleaved by enzymes such as peptidases and proteases in cells. Peptide-based cleavable linking groups are peptide bonds formed between amino acids to yield oligopeptides (e.g., dipeptides, tripeptides etc.) and polypeptides. Peptide-based cleavable groups do not include the amide group (—C(O)NH—). The amide group can be formed between any alkylene, alkenylene or alkynylene. A peptide bond is a special type of amide bond formed between amino acids to yield peptides and proteins. The peptide based cleavage group is generally limited to the peptide bond (i.e., the amide bond) formed between amino acids yielding peptides and proteins and does not include the entire amide functional group. Peptide-based cleavable linking groups have the general formula—NHCHRAC(O)NHCHRBC(O)—, where RA and RB are the R groups of the two adjacent amino acids. These candidates can be evaluated using methods analogous to those described above.

[0627] In some embodiments, an iRNA of the invention is conjugated to a carbohydrate through a linker. Non-limiting examples of iRNA carbohydrate conjugates with linkers of the compositions and methods of the invention include but are not limited to,

[chemical structure]

[chemical structure]

[chemical structure]

when one of X or Y is an oligonucleotide, the other is a hydrogen.

[0628] In certain embodiments of the compositions and methods of the invention, a ligand is one or more “GalNAC” (N-acetylgalactosamine) derivatives attached through a bivalent or trivalent branched linker.

[0629] In one embodiment, a dsRNA of the invention is conjugated to a bivalent or trivalent branched linker selected from the group of structures shown in any of formula (XLV)-(XLVI):

[chemical structure]

[0630] wherein:
[0631] q2A, q2B, q3A, q3B, q4A, q4B, q5A, q5B and q5C represent independently for each occurrence 0-20 and wherein the repeating unit can be the same or different;
[0632] P^{2A}, P^{2B}, P^{3A}, P^{3B}, P^{4A}, P^{4B}, P^{5A}, P^{5B}, P^{5C}, T^{2A}, T^{2B}, T^{3A}, T^{3B}, T^{4A}, T^{4B}, T^{4A}, T^{5B}, T^{5C} are each independently for each occurrence absent, CO, NH, O, S, OC(O), NHC(O), CH₂, CH₂NH or CH₂O; Q^{2A}, Q^{2B}, Q^{3A}, Q^{3B}, Q^{4A}, Q^{4B}, Q^{5A}, Q^{5B}, Q^{5C} are independently for each occurrence absent, alkylene, substituted alkylene wherein one or more methylenes can be interrupted or terminated by one or more of O, S, S(O), SO₂, N(R^{N}), C(R′)═C(R″), C≡C or C(O);
[0633] R^{2A}, R^{2B}, R^{3A}, R^{3B}, R^{4A}, R^{4B}, R^{5A}, R^{5B}, R^{5C} are each independently for each occurrence absent, NH, O, S, CH₂, C(O)O, C(O)NH, NHCH(R^{a})C(O), —C(O)—CH(R^{a})—NH—, CO, CH═N—O,

[chemical structure]

or heterocyclyl; L^{2A}, L^{2B}, L^{3A} L^{3B}, L^{4A}, L^{4B} L^{5A}, L^{5B} and L^{5C} represent the ligand; i.e. each independently for each occurrence a monosaccharide (such as GalNAc), disaccharide, trisaccharide, tetrasaccharide, oligosaccharide, or polysaccharide; and R^{a} is H or amino acid side chain. Trivalent conjugating GalNAc derivatives are particularly useful for use with RNAi agents for inhibiting the expression of a target gene, such as those of formula (XLIX):

[chemical structure]

wherein L^{5A} L^{5B} and L^{5C} represent a monosaccharide, such as GalNAc derivative.

[0634] Examples of suitable bivalent and trivalent branched linker groups conjugating GalNAc derivatives include, but are not limited to, the structures recited above as formulas II, VII, XI, X, and XIII.

[0635] Representative U.S. patents that teach the preparation of RNA conjugates include, but are not limited to, U.S. Pat. Nos. 4,828,979; 4,948,882; 5,218,105; 5,525,465; 5,541,313; 5,545,730; 5,552,538; 5,578,717, 5,580,731; 5,591,584; 5,109,124; 5,118,802; 5,138,045; 5,414,077; 5,486,603; 5,512,439; 5,578,718; 5,608,046; 4,587,044; 4,605,735; 4,667,025; 4,762,779; 4,789,737; 4,824,941; 4,835,263; 4,876,335; 4,904,582; 4,958,013; 5,082,830; 5,112,963; 5,214,136; 5,082,830; 5,112,963; 5,214,136; 5,245,022; 5,254,469; 5,258,506; 5,262,536; 5,272,250; 5,292,873; 5,317,098; 5,371,241, 5,391,723; 5,416,203, 5,451,463; 5,510,475; 5,512,667; 5,514,785; 5,565,552; 5,567,810; 5,574,142; 5,585,481; 5,587,371; 5,595,726; 5,597,696; 5,599,923; 5,599,928; 5,688,941; 6,294,664; 6,320,017; 6,576,752; 6,783,931; 6,900,297; 7,037,646; and 8,106,022, the entire contents of each of which are hereby incorporated herein by reference.

[0636] It is not necessary for all positions in a given compound to be uniformly modified, and in fact more than one of the aforementioned modifications can be incorporated in a single compound or even at a single nucleoside within an iRNA. The present invention also includes iRNA compounds that are chimeric compounds.

[0637] “Chimeric” iRNA compounds or “chimeras,” in the context of this invention, are iRNA compounds, such as, dsRNAi agents, that contain two or more chemically distinct regions, each made up of at least one monomer unit, i.e., a nucleotide in the case of a dsRNA compound. These iRNAs typically contain at least one region wherein the RNA is modified so as to confer upon the iRNA increased resistance to nuclease degradation, increased cellular uptake, or increased binding affinity for the target nucleic acid. An additional region of the iRNA can serve as a substrate for enzymes capable of cleaving RNA:DNA or RNA:RNA hybrids. By way of example, RNase H is a cellular endonuclease which cleaves the RNA strand of an RNA:DNA duplex. Activation of RNase H, therefore, results in cleavage of the RNA target, thereby greatly enhancing the efficiency of iRNA inhibition of gene expression. Consequently, comparable results can often be obtained with shorter iRNAs when chimeric dsRNAs are used, compared to phosphorothioate deoxy dsRNAs hybridizing to the same target region. Cleavage of the RNA target can be routinely detected by gel electrophoresis and, if necessary, associated nucleic acid hybridization techniques known in the art.

[0638] In certain instances, the RNA of an iRNA can be modified by a non-ligand group. A number of non-ligand molecules have been conjugated to iRNAs in order to enhance the activity, cellular distribution or cellular uptake of the iRNA, and procedures for performing such conjugations are available in the scientific literature. Such non-ligand moieties have included lipid moieties, such as cholesterol (Kubo, T. et al., Biochem. Biophys. Res. Comm., 2007, 365(1):54-61; Letsinger et al., Proc. Natl. Acad. Sci. USA, 1989, 86:6553), cholic acid (Manoharan et al., Bioorg. Med. Chem. Lett., 1994, 4:1053), a thioether, e.g., hexyl-S-tritylthiol (Manoharan et al., Ann. N. Y. Acad. Sci., 1992, 660:306; Manoharan et al., Bioorg. Med. Chem. Let., 1993, 3:2765), a thiocholesterol (Oberhauser et al., Nucl. Acids Res., 1992, 20:533), an aliphatic chain, e.g., dodecandiol or undecyl residues (Saison-Behmoaras et al., EMBO J., 1991, 10:111; Kabanov et al., FEBS Lett., 1990, 259:327; Svinarchuk et al., Biochimie, 1993, 75:49), a phospholipid, e.g., di-hexadecyl-rac-glycerol or triethylammonium 1,2-di-O-hexadecyl-rac-glycero-3-H-phosphonate (Manoharan et al., Tetrahedron Lett., 1995, 36:3651; Shea et al., Nucl. Acids Res., 1990, 18:3777), a polyamine or a polyethylene glycol chain (Manoharan et al., Nucleosides & Nucleotides, 1995, 14:969), or adamantane acetic acid (Manoharan et al., Tetrahedron Lett., 1995, 36:3651), a palmityl moiety (Mishra et al., Biochim. Biophys. Acta, 1995, 1264:229), or an octadecylamine or hexylamino-carbonyl-oxycholesterol moiety (Crooke et al., J. Pharmacol. Exp. Ther., 1996, 277:923). Representative United States patents that teach the preparation of such RNA conjugates have been listed above. Typical conjugation protocols involve the synthesis of RNAs bearing an aminolinker at one or more positions of the sequence. The amino group is then reacted with the molecule being conjugated using appropriate coupling or activating reagents. The conjugation reaction can be performed either with the RNA still bound to the solid support or following cleavage of the RNA, in solution phase. Purification of the RNA conjugate by HPLC typically affords the pure conjugate.

### IV. Delivery of an iRNA of the Invention

[0639] The delivery of an iRNA of the invention to a cell e.g., a cell within a subject, such as a human subject (e.g., a subject in need thereof, such as a subject susceptible to or diagnosed with a CTNNB1-associated disorder, e.g., cancer, e.g., hepatocellular carcinoma) can be achieved in a number of different ways. For example, delivery may be performed by contacting a cell with an iRNA of the invention either in vitro or in vivo. In vivo delivery may also be performed directly by administering a composition comprising an iRNA, e.g., a dsRNA, to a subject. Alternatively, in vivo delivery may be performed indirectly by administering one or more vectors that encode and direct the expression of the iRNA. These alternatives are discussed further below.

[0640] In general, any method of delivering a nucleic acid molecule (in vitro or in vivo) can be adapted for use with an iRNA of the invention (see e.g., Akhtar S. and Julian R L. (1992) Trends Cell. Biol. 2(5):139-144 and WO94/02595, which are incorporated herein by reference in their entireties). For in vivo delivery, factors to consider in order to deliver an iRNA molecule include, for example, biological stability of the delivered molecule, prevention of non-specific effects, and accumulation of the delivered molecule in the target tissue. RNA interference has also shown success with local delivery to the CNS by direct injection (Dorn, G., et al. (2004) Nucleic Acids 32:e49; Tan, P H., et al (2005) Gene Ther. 12:59-66; Makimura, H., et al (2002) BMC Neurosci. 3:18; Shishkina, G T., et al (2004) Neuroscience 129:521-528; Thakker, E R., et al (2004) Proc. Natl. Acad. Sci. U.S.A. 101:17270-17275; Akaneya, Y., et al (2005) J Neurophysiol. 93:594-602). Modification of the RNA or the pharmaceutical carrier can also permit targeting of the iRNA to the target tissue and avoid undesirable off-target effects. iRNA molecules can be modified by chemical conjugation to lipophilic groups such as cholesterol to enhance cellular uptake and prevent degradation. For example, an iRNA directed against ApoB conjugated to a lipophilic cholesterol moiety was injected systemically into mice and resulted in knockdown of apoB mRNA in both the liver and jejunum (Soutschek, J., et al (2004) Nature 432:173-178).

[0641] In an alternative embodiment, the iRNA can be delivered using drug delivery systems such as a nanoparticle, a dendrimer, a polymer, liposomes, or a cationic delivery system. Positively charged cationic delivery systems facilitate binding of an iRNA molecule (negatively charged) and also enhance interactions at the negatively charged cell membrane to permit efficient uptake of an iRNA by the cell. Cationic lipids, dendrimers, or polymers can either be bound to an iRNA, or induced to form a vesicle or micelle (see e.g., Kim S H, et al (2008) Journal of Controlled Release 129(2):107-116) that encases an iRNA. The formation of vesicles or micelles further prevents degradation of the iRNA when administered systemically. Methods for making and administering cationic-iRNA complexes are well within the abilities of one skilled in the art (see e.g., Sorensen, D R, et al (2003) J. Mol. Biol 327:761-766; Verma, U N, et al (2003) Clin. Cancer Res. 9:1291-1300; Arnold, A S et al (2007) J Hypertens. 25:197-205, which are incorporated herein by reference in their entirety). Some non-limiting examples of drug delivery systems useful for systemic delivery of iRNAs include DOTAP (Sorensen, D R., et al (2003), supra; Verma, U N, et al (2003), supra), “solid nucleic acid lipid particles” (Zimmermann, T S, et al (2006) Nature 441:111-114), cardiolipin (Chien, P Y, et al (2005) Cancer Gene Ther. 12:321-328; Pal, A, et al (2005) Int J. Oncol. 26:1087-1091), polyethyleneimine (Bonnet M E, et al (2008) Pharm. Res. August 16 Epub ahead of print; Aigner, A. (2006) J. Biomed. Biotechnol. 71659), Arg-Gly-Asp (RGD) peptides (Liu, S. (2006) Mol. Pharm. 3:472-487), and polyamidoamines (Tomalia, D A, et al (2007) Biochem. Soc. Trans. 35:61-67; Yoo, H., et al (1999) Pharm. Res. 16:1799-1804). In some embodiments, an iRNA forms a complex with cyclodextrin for systemic administration. Methods for administration and pharmaceutical compositions of iRNAs and cyclodextrins can be found in U.S. Pat. No. 7,427,605, which is herein incorporated by reference in its entirety. Certain aspects of the instant disclosure relate to a method of reducing the expression of a CTNNB1 gene in a cell, comprising contacting said cell with the double-stranded RNAi agent of the disclosure. In one embodiment, the cell is a hepatic cell, optionally a hepatocyte. In one embodiment, the cell is an extrahepatic cell.

A. Vector Encoded iRNAs of the Invention

[0642] iRNA targeting the CTNNB1 gene can be expressed from transcription units inserted into DNA or RNA vectors (see, e.g., Couture, A, et al., TIG. (1996), 12:5-10; Skillern, A, et al., International PCT Publication No. WO 00/22113, Conrad, International PCT Publication No. WO 00/22114, and Conrad, U.S. Pat. No. 6,054,299). Expression can be transient (on the order of hours to weeks) or sustained (weeks to months or longer), depending upon the specific construct used and the target tissue or cell type. These transgenes can be introduced as a linear construct, a circular plasmid, or a viral vector, which can be an integrating or non-integrating vector. The transgene can also be constructed to permit it to be inherited as an extrachromosomal plasmid (Gassmann, et al., Proc. Natl. Acad. Sci. USA (1995) 92:1292).

[0643] Viral vector systems which can be utilized with the methods and compositions described herein include, but are not limited to, (a) adenovirus vectors; (b) retrovirus vectors, including but not limited to lentiviral vectors, moloney murine leukemia virus, etc.; (c) adeno-associated virus vectors; (d) herpes simplex virus vectors; (e) SV 40 vectors; (f) polyoma virus vectors; (g) papilloma virus vectors; (h) picornavirus vectors; (i) pox virus vectors such as an orthopox, e.g., vaccinia virus vectors or avipox, e.g. canary pox or fowl pox; and (j) a helper-dependent or gutless adenovirus. Replication-defective viruses can also be advantageous. Different vectors will or will not become incorporated into the cells' genome. The constructs can include viral sequences for transfection, if desired. Alternatively, the construct can be incorporated into vectors capable of episomal replication, e.g. EPV and EBV vectors. Constructs for the recombinant expression of an iRNA will generally require regulatory elements, e.g., promoters, enhancers, etc., to ensure the expression of the iRNA in target cells. Other aspects to consider for vectors and constructs are known in the art.

### V. Pharmaceutical Compositions of the Invention

[0644] The present invention also includes pharmaceutical compositions and formulations which include the iRNAs of the invention. In one embodiment, provided herein are pharmaceutical compositions containing an iRNA, as described herein, and a pharmaceutically acceptable carrier. The pharmaceutical compositions containing the iRNA are useful for preventing or treating a CTNNB1-associated disorder, e.g., cancer, e.g., hepatocellular carcinoma.

[0645] Such pharmaceutical compositions are formulated based on the mode of delivery. One example is compositions that are formulated for systemic administration via parenteral delivery, e.g., by subcutaneous (SC), intramuscular (IM), or intravenous (IV) delivery. The pharmaceutical compositions of the invention may be administered in dosages sufficient to inhibit expression of a CTNNB1 gene.

[0646] In some embodiments, the pharmaceutical compositions of the invention are sterile. In another embodiment, the pharmaceutical compositions of the invention are pyrogen free.

[0647] The pharmaceutical compositions of the invention may be administered in dosages sufficient to inhibit expression of a CTNNB1 gene. In general, a suitable dose of an iRNA of the invention will be in the range of about 0.001 to about 200.0 milligrams per kilogram body weight of the recipient per day, generally in the range of about 1 to 50 mg per kilogram body weight per day. Typically, a suitable dose of an iRNA of the invention will be in the range of about 0.1 mg/kg to about 5.0 mg/kg, such as, about 0.3 mg/kg and about 3.0 mg/kg. A repeat-dose regimen may include administration of a therapeutic amount of iRNA on a regular basis, such as every month, once every 3-6 months, or once a year. In certain embodiments, the iRNA is administered about once per month to about once per six months.

[0648] After an initial treatment regimen, the treatments can be administered on a less frequent basis. Duration of treatment can be determined based on the severity of disease.

[0649] In other embodiments, a single dose of the pharmaceutical compositions can be long lasting, such that doses are administered at not more than 1, 2, 3, or 4 month intervals. In some embodiments of the invention, a single dose of the pharmaceutical compositions of the invention is administered about once per month. In other embodiments of the invention, a single dose of the pharmaceutical compositions of the invention is administered quarterly (i.e., about every three months). In other embodiments of the invention, a single dose of the pharmaceutical compositions of the invention is administered twice per year (i.e., about once every six months).

[0650] The skilled artisan will appreciate that certain factors can influence the dosage and timing required to effectively treat a subject, including but not limited to mutations present in the subject, previous treatments, the general health or age of the subject, and other diseases present. Moreover, treatment of a subject with a prophylactically or therapeutically effective amount, as appropriate, of a composition can include a single treatment or a series of treatments.

[0651] The pharmaceutical compositions of the present disclosure can be administered in a number of ways depending upon whether local or systemic treatment is desired and upon the area to be treated. Administration may be topical (including ophthalmic, vaginal, rectal, intranasal, transdermal), oral, or parenteral. Parenteral administration includes intravenous, intraarterial, subcutaneous, intraperitoneal or intramuscular injection or infusion; subdermal, e.g., via an implanted device; or intracranial, e.g., by intraparenchymal, intrathecal or intraventricular, administration.

[0652] The iRNA can be delivered in a manner to target a particular tissue, such as the liver.

[0653] Pharmaceutical compositions and formulations for topical administration can include transdermal patches, ointments, lotions, creams, gels, drops, suppositories, sprays, liquids and powders. Conventional pharmaceutical carriers, aqueous, powder or oily bases, thickeners and the like can be necessary or desirable. Coated condoms, gloves and the like can also be useful. Suitable topical formulations include those in which the RNAi agents featured in the disclosure are in admixture with a topical delivery agent such as lipids, liposomes, fatty acids, fatty acid esters, steroids, chelating agents and surfactants. Suitable lipids and liposomes include neutral (e.g., dioleoylphosphatidyl DOPE ethanolamine, dimyristoylphosphatidyl choline DMPC, distearolyphosphatidyl choline) negative (e.g., dimyristoylphosphatidyl glycerol DMPG) and cationic (e.g., dioleoyltetramethylaminopropyl DOTAP and dioleoylphosphatidyl ethanolamine DOTMA). RNAi agents featured in the disclosure can be encapsulated within liposomes or can form complexes thereto, in particular to cationic liposomes. Alternatively, RNAi agents can be complexed to lipids, in particular to cationic lipids. Suitable fatty acids and esters include but are not limited to arachidonic acid, oleic acid, eicosanoic acid, lauric acid, caprylic acid, capric acid, myristic acid, palmitic acid, stearic acid, linoleic acid, linolenic acid, dicaprate, tricaprate, monoolein, dilaurin, glyceryl 1-monocaprate, 1-dodecylazacycloheptan-2-one, an acylcamitine, an acylcholine, or a C1-20 alkyl ester (e.g., isopropylmyristate IPM), monoglyceride, diglyceride or pharmaceutically acceptable salt thereof. Topical formulations are described in detail in U.S. Pat. No. 6,747,014, which is incorporated herein by reference.

[0654] In one embodiment, the siRNAs, double stranded RNA agents of the invention, are administered to a cell in a pharmaceutical composition by a topical route of administration. In one embodiment, the pharmaceutical composition may include an siRNA compound mixed with a topical delivery agent. The topical delivery agent can be a plurality of microscopic vesicles. The microscopic vesicles can be liposomes. In some embodiments the liposomes are cationic liposomes.

[0655] In another embodiment, the dsRNA agent is admixed with a topical penetration enhancer. In one embodiment, the topical penetration enhancer is a fatty acid. The fatty acid can be arachidonic acid, oleic acid, lauric acid, caprylic acid, capric acid, myristic acid, palmitic acid, stearic acid, linoleic acid, linolenic acid, dicaprate, tricaprate, monolein, dilaurin, glyceryl 1-monocaprate, 1-dodecylazacycloheptan-2-one, an acylcamitine, an acylcholine, or a C1-10 alkyl ester, monoglyceride, diglyceride or pharmaceutically acceptable salt thereof.

[0656] In another embodiment, the topical penetration enhancer is a bile salt. The bile salt can be cholic acid, dehydrocholic acid, deoxycholic acid, glucholic acid, glycholic acid, glycodeoxycholic acid, taurocholic acid, taurodeoxycholic acid, chenodeoxycholic acid, ursodeoxycholic acid, sodium tauro-24,25-dihydro-fusidate, sodium glycodihydrofusidate, polyoxyethylene-9-lauryl ether or a pharmaceutically acceptable salt thereof.

[0657] In another embodiment, the penetration enhancer is a chelating agent. The chelating agent can be EDTA, citric acid, a salicyclate, a N-acyl derivative of collagen, laureth-9, an N-amino acyl derivative of a beta-diketone or a mixture thereof.

[0658] In another embodiment, the penetration enhancer is a surfactant, e.g., an ionic or nonionic surfactant. The surfactant can be sodium lauryl sulfate, polyoxyethylene-9-lauryl ether, polyoxyethylene-20-cetyl ether, a perfluorochemical emulsion or mixture thereof.

[0659] In another embodiment, the penetration enhancer can be selected from a group consisting of unsaturated cyclic ureas, 1-alkyl-alkones, 1-alkenylazacyclo-alakanones, steroidal anti-inflammatory agents and mixtures thereof. In yet another embodiment the penetration enhancer can be a glycol, a pyrrol, an azone, or a terpenes.

[0660] In one aspect, the invention features a pharmaceutical composition including an siRNA compound, e.g., a double-stranded siRNA compound, or ssiRNA compound, (e.g., a precursor, e.g., a larger siRNA compound which can be processed into a ssiRNA compound, or a DNA which encodes an siRNA compound, e.g., a double-stranded siRNA compound, or ssiRNA compound, or precursor thereof) in an injectable dosage form. In one embodiment, the injectable dosage form of the pharmaceutical composition includes sterile aqueous solutions or dispersions and sterile powders. In some embodiments the sterile solution can include a diluent such as water; saline solution; fixed oils, polyethylene glycols, glycerin, or propylene glycol.

[0661] The iRNA molecules of the invention can be incorporated into pharmaceutical compositions. Such compositions typically include one or more species of iRNA and a pharmaceutically acceptable carrier. As used herein the language “pharmaceutically acceptable carrier” is intended to include any and all solvents, dispersion media, coatings, antibacterial and antifungal agents, isotonic and absorption delaying agents, and the like, compatible with pharmaceutical administration to a cell, e.g., a liver cell. The use of such media and agents for pharmaceutically active substances is well known in the art. Except insofar as any conventional media or agent is incompatible with the active compound, use thereof in the compositions is contemplated. Supplementary active compounds can also be incorporated into the compositions.

[0662] Pharmaceutical compositions of the present invention include, but are not limited to, solutions, emulsions, and liposome-containing formulations. These compositions can be generated from a variety of components that include, but are not limited to, preformed liquids, self-emulsifying solids, and self-emulsifying semisolids. Formulations include those that target the liver.

[0663] The pharmaceutical formulations of the present invention, which can conveniently be presented in unit dosage form, can be prepared according to conventional techniques well known in the pharmaceutical industry. Such techniques include the step of bringing into association the active ingredients with the pharmaceutical carrier(s) or excipient(s). In general, the formulations are prepared by uniformly and intimately bringing into association the active ingredients with liquid carriers.

[0664] iRNAs featured in the invention can be encapsulated within liposomes or can form complexes thereto, in particular to cationic liposomes. Alternatively, iRNAs can be complexed to lipids, in particular to cationic lipids. Suitable fatty acids and esters include but are not limited to arachidonic acid, oleic acid, eicosanoic acid, lauric acid, caprylic acid, capric acid, myristic acid, palmitic acid, stearic acid, linoleic acid, linolenic acid, dicaprate, tricaprate, monoolein, dilaurin, glyceryl 1-monocaprate, 1-dodecylazacycloheptan-2-one, an acylcamitine, an acylcholine, or a C₁₋₂₀ alkyl ester (e.g., isopropylmyristate IPM), monoglyceride, diglyceride or pharmaceutically acceptable salt thereof). Topical formulations are described in detail in U.S. Pat. No. 6,747,014, which is incorporated herein by reference.

A. iRNA Formulations Comprising Membranous Molecular Assemblies

[0665] An iRNA for use in the compositions and methods of the invention can be formulated for delivery in a membranous molecular assembly, e.g., a liposome or a micelle. As used herein, the term “liposome” refers to a vesicle composed of amphiphilic lipids arranged in at least one bilayer, e.g., one bilayer or a plurality of bilayers. Liposomes include unilamellar and multilamellar vesicles that have a membrane formed from a lipophilic material and an aqueous interior. The aqueous portion contains the iRNA composition. The lipophilic material isolates the aqueous interior from an aqueous exterior, which typically does not include the iRNA composition, although in some examples, it may. Liposomes are useful for the transfer and delivery of active ingredients to the site of action. Because the liposomal membrane is structurally similar to biological membranes, when liposomes are applied to a tissue, the liposomal bilayer fuses with bilayer of the cellular membranes. As the merging of the liposome and cell progresses, the internal aqueous contents that include the iRNA are delivered into the cell where the iRNA can specifically bind to a target RNA and can mediate RNAi. In some cases the liposomes are also specifically targeted, e.g., to direct the iRNA to particular cell types.

[0666] A liposome containing a RNAi agent can be prepared by a variety of methods. In one example, the lipid component of a liposome is dissolved in a detergent so that micelles are formed with the lipid component. For example, the lipid component can be an amphipathic cationic lipid or lipid conjugate. The detergent can have a high critical micelle concentration and may be nonionic. Exemplary detergents include cholate, CHAPS, octylglucoside, deoxycholate, and lauroyl sarcosine. The RNAi agent preparation is then added to the micelles that include the lipid component. The cationic groups on the lipid interact with the RNAi agent and condense around the RNAi agent to form a liposome. After condensation, the detergent is removed, e.g., by dialysis, to yield a liposomal preparation of RNAi agent.

[0667] If necessary a carrier compound that assists in condensation can be added during the condensation reaction, e.g., by controlled addition. For example, the carrier compound can be a polymer other than a nucleic acid (e.g., spermine or spermidine). pH can also adjusted to favor condensation.

[0668] Methods for producing stable polynucleotide delivery vehicles, which incorporate a polynucleotide/cationic lipid complex as structural components of the delivery vehicle, are further described in, e.g., WO 96/37194, the entire contents of which are incorporated herein by reference. Liposome formation can also include one or more aspects of exemplary methods described in Felgner, P. L. et al., Proc. Natl. Acad. Sci., USA 8:7413-7417, 1987; U.S. Pat. Nos. 4,897,355; 5,171,678; Bangham, et al. M Mol. Biol. 23:238, 1965; Olson, et al. Biochim. Biophys. Acta 557:9, 1979; Szoka, et al. Proc. Natl. Acad. Sci. 75: 4194, 1978; Mayhew, et al. Biochim. Biophys. Acta 775:169, 1984; Kim, et al. Biochim. Biophys. Acta 728:339, 1983; and Fukunaga, et al. Endocrinol. 115:757, 1984. Commonly used techniques for preparing lipid aggregates of appropriate size for use as delivery vehicles include sonication and freeze-thaw plus extrusion (see, e.g., Mayer, et al. Biochim. Biophys. Acta 858:161, 1986). Microfluidization can be used when consistently small (50 to 200 nm) and relatively uniform aggregates are desired (Mayhew, et al. Biochim. Biophys. Acta 775:169, 1984). These methods are readily adapted to packaging RNAi agent preparations into liposomes.

[0669] Liposomes fall into two broad classes. Cationic liposomes are positively charged liposomes which interact with the negatively charged nucleic acid molecules to form a stable complex. The positively charged nucleic acid/liposome complex binds to the negatively charged cell surface and is internalized in an endosome. Due to the acidic pH within the endosome, the liposomes are ruptured, releasing their contents into the cell cytoplasm (Wang et al., Biochem. Biophys. Res. Commun., 1987, 147, 980-985).

[0670] Liposomes which are pH-sensitive or negatively-charged, entrap nucleic acids rather than complex with it. Since both the nucleic acid and the lipid are similarly charged, repulsion rather than complex formation occurs. Nevertheless, some nucleic acid is entrapped within the aqueous interior of these liposomes. pH-sensitive liposomes have been used to deliver nucleic acids encoding the thymidine kinase gene to cell monolayers in culture. Expression of the exogenous gene was detected in the target cells (Zhou et al., Journal of Controlled Release, 1992, 19, 269-274).

[0671] One major type of liposomal composition includes phospholipids other than naturally-derived phosphatidylcholine. Neutral liposome compositions, for example, can be formed from dimyristoyl phosphatidylcholine (DMPC) or dipalmitoyl phosphatidylcholine (DPPC). Anionic liposome compositions generally are formed from dimyristoyl phosphatidylglycerol, while anionic fusogenic liposomes are formed primarily from dioleoyl phosphatidylethanolamine (DOPE). Another type of liposomal composition is formed from phosphatidylcholine (PC) such as, for example, soybean PC, and egg PC. Another type is formed from mixtures of phospholipid and/or phosphatidylcholine and/or cholesterol.

[0672] Examples of other methods to introduce liposomes into cells in vitro and in vivo include U.S. Pat. Nos. 5,283,185; 5,171,678; WO 94/00569; WO 93/24640; WO 91/16024; Felgner, J Biol. Chem. 269:2550, 1994; Nabel, Proc. Natl. Acad. Sci. 90:11307, 1993; Nabel, Human Gene Ther. 3:649, 1992; Gershon, Biochem. 32:7143, 1993; and Strauss EMBO J. 11:417, 1992.

[0673] Non-ionic liposomal systems have also been examined to determine their utility in the delivery of drugs to the skin, in particular systems comprising non-ionic surfactant and cholesterol. Non-ionic liposomal formulations comprising Novasome™ I (glyceryl dilaurate/cholesterol/polyoxyethylene-10-stearyl ether) and Novasome™ II (glyceryl distearate/cholesterol/polyoxyethylene-10-stearyl ether) were used to deliver cyclosporin-A into the dermis of mouse skin. Results indicated that such non-ionic liposomal systems were effective in facilitating the deposition of cyclosporine A into different layers of the skin (Hu et al. S.T.P. Pharma. Sci., 1994, 4(6) 466).

[0674] Liposomes also include “sterically stabilized” liposomes, a term which, as used herein, refers to liposomes comprising one or more specialized lipids that, when incorporated into liposomes, result in enhanced circulation lifetimes relative to liposomes lacking such specialized lipids. Examples of sterically stabilized liposomes are those in which part of the vesicle-forming lipid portion of the liposome (A) comprises one or more glycolipids, such as monosialoganglioside G_{M1}, or (B) is derivatized with one or more hydrophilic polymers, such as a polyethylene glycol (PEG) moiety. While not wishing to be bound by any particular theory, it is thought in the art that, at least for sterically stabilized liposomes containing gangliosides, sphingomyelin, or PEG-derivatized lipids, the enhanced circulation half-life of these sterically stabilized liposomes derives from a reduced uptake into cells of the reticuloendothelial system (RES) (Allen et al., FEBS Letters, 1987, 223, 42; Wu et al., Cancer Research, 1993, 53, 3765).

[0675] Various liposomes comprising one or more glycolipids are known in the art. Papahadjopoulos et al. (Ann. N.Y. Acad. Sci., 1987, 507, 64) reported the ability of monosialoganglioside G_{M1}, galactocerebroside sulfate and phosphatidylinositol to improve blood half-lives of liposomes. These findings were expounded upon by Gabizon et al. (Proc. Natl. Acad. Sci. U.S.A., 1988, 85, 6949). U.S. Pat. No. 4,837,028 and WO 88/04924, both to Allen et al., disclose liposomes comprising (1) sphingomyelin and (2) the ganglioside G_{M1} or a galactocerebroside sulfate ester. U.S. Pat. No. 5,543,152 (Webb et al.) discloses liposomes comprising sphingomyelin. Liposomes comprising 1,2-sn-dimyristoylphosphatidylcholine are disclosed in WO 97/13499 (Lim et al).

[0676] In one embodiment, cationic liposomes are used. Cationic liposomes possess the advantage of being able to fuse to the cell membrane. Non-cationic liposomes, although not able to fuse as efficiently with the plasma membrane, are taken up by macrophages in vivo and can be used to deliver RNAi agents to macrophages.

[0677] Further advantages of liposomes include: liposomes obtained from natural phospholipids are biocompatible and biodegradable; liposomes can incorporate a wide range of water and lipid soluble drugs; liposomes can protect encapsulated RNAi agents in their internal compartments from metabolism and degradation (Rosoff, in “Pharmaceutical Dosage Forms,” Lieberman, Rieger and Banker (Eds.), 1988, volume 1, p. 245). Important considerations in the preparation of liposome formulations are the lipid surface charge, vesicle size and the aqueous volume of the liposomes.

[0678] A positively charged synthetic cationic lipid, N-[1-(2,3-dioleyloxy)propyl]-N,N,N-trimethylammonium chloride (DOTMA) can be used to form small liposomes that interact spontaneously with nucleic acid to form lipid-nucleic acid complexes which are capable of fusing with the negatively charged lipids of the cell membranes of tissue culture cells, resulting in delivery of RNAi agent (see, e.g., Felgner, P. L. et al., Proc. Natl. Acad. Sci., USA 8:7413-7417, 1987 and U.S. Pat. No. 4,897,355 for a description of DOTMA and its use with DNA).

[0679] A DOTMA analogue, 1,2-bis(oleoyloxy)-3-(trimethylammonia)propane (DOTAP) can be used in combination with a phospholipid to form DNA-complexing vesicles. Lipofectin™ Bethesda Research Laboratories, Gaithersburg, Md.) is an effective agent for the delivery of highly anionic nucleic acids into living tissue culture cells that comprise positively charged DOTMA liposomes which interact spontaneously with negatively charged polynucleotides to form complexes. When enough positively charged liposomes are used, the net charge on the resulting complexes is also positive. Positively charged complexes prepared in this way spontaneously attach to negatively charged cell surfaces, fuse with the plasma membrane, and efficiently deliver functional nucleic acids into, for example, tissue culture cells. Another commercially available cationic lipid, 1,2-bis(oleoyloxy)-3,3-(trimethylammonia)propane (“DOTAP”) (Boehringer Mannheim, Indianapolis, Indiana) differs from DOTMA in that the oleoyl moieties are linked by ester, rather than ether linkages.

[0680] Other reported cationic lipid compounds include those that have been conjugated to a variety of moieties including, for example, carboxyspermine which has been conjugated to one of two types of lipids and includes compounds such as 5-carboxyspermylglycine dioctaoleoylamide (“DOGS”) (Transfectam™, Promega, Madison, Wisconsin) and dipalmitoylphosphatidylethanolamine 5-carboxyspermyl-amide (“DPPES”) (see, e.g., U.S. Pat. No. 5,171,678).

[0681] Another cationic lipid conjugate includes derivatization of the lipid with cholesterol (“DC-Chol”) which has been formulated into liposomes in combination with DOPE (See, Gao, X. and Huang, L., Biochim. Biophys. Res. Commun. 179:280, 1991). Lipopolylysine, made by conjugating polylysine to DOPE, has been reported to be effective for transfection in the presence of serum (Zhou, X. et al., Biochim. Biophys. Acta 1065:8, 1991). For certain cell lines, these liposomes containing conjugated cationic lipids, are said to exhibit lower toxicity and provide more efficient transfection than the DOTMA-containing compositions. Other commercially available cationic lipid products include DMRIE and DMRIE-HP (Vical, La Jolla, California) and Lipofectamine (DOSPA) (Life Technology, Inc., Gaithersburg, Maryland). Other cationic lipids suitable for the delivery of oligonucleotides are described in WO 98/39359 and WO 96/37194.

[0682] Liposomal formulations are particularly suited for topical administration, liposomes present several advantages over other formulations. Such advantages include reduced side effects related to high systemic absorption of the administered drug, increased accumulation of the administered drug at the desired target, and the ability to administer RNAi agent into the skin. In some implementations, liposomes are used for delivering RNAi agent to epidermal cells and also to enhance the penetration of RNAi agent into dermal tissues, e.g., into skin. For example, the liposomes can be applied topically. Topical delivery of drugs formulated as liposomes to the skin has been documented (see, e.g., Weiner et al., Journal of Drug Targeting, 1992, vol. 2,405-410 and du Plessis et al., Antiviral Research, 18, 1992, 259-265; Mannino, R. J. and Fould-Fogerite, S., Biotechniques 6:682-690, 1988; Itani, T. et al. Gene 56:267-276. 1987; Nicolau, C. et al. Meth. Enz. 149:157-176, 1987; Straubinger, R. M. and Papahadjopoulos, D. Meth. Enz. 101:512-527, 1983; Wang, C. Y. and Huang, L., Proc. Natl. Acad. Sci. USA 84:7851-7855, 1987).

[0683] Non-ionic liposomal systems have also been examined to determine their utility in the delivery of drugs to the skin, in particular systems comprising non-ionic surfactant and cholesterol. Non-ionic liposomal formulations comprising Novasome I (glyceryl dilaurate/cholesterol/polyoxyethylene-10-stearyl ether) and Novasome II (glyceryl distearate/cholesterol/polyoxyethylene-10-stearyl ether) were used to deliver a drug into the dermis of mouse skin. Such formulations with RNAi agent are useful for treating a dermatological disorder.

[0684] Liposomes that include iRNA can be made highly deformable. Such deformability can enable the liposomes to penetrate through pore that are smaller than the average radius of the liposome. For example, transfersomes are a type of deformable liposomes. Transferosomes can be made by adding surface edge activators, usually surfactants, to a standard liposomal composition. Transfersomes that include RNAi agent can be delivered, for example, subcutaneously by infection in order to deliver RNAi agent to keratinocytes in the skin. In order to cross intact mammalian skin, lipid vesicles must pass through a series of fine pores, each with a diameter less than 50 nm, under the influence of a suitable transdermal gradient. In addition, due to the lipid properties, these transferosomes can be self-optimizing (adaptive to the shape of pores, e.g., in the skin), self-repairing, and can frequently reach their targets without fragmenting, and often self-loading.

[0685] Other formulations amenable to the present invention are described in U.S. provisional application Ser. No. 61/018,616, filed Jan. 2, 2008; 61/018,611, filed Jan. 2, 2008; 61/039,748, filed Mar. 26, 2008; 61/047,087, filed Apr. 22, 2008 and 61/051,528, filed May 8, 2008. PCT application no PCT/US2007/080331, filed Oct. 3, 2007 also describes formulations that are amenable to the present invention.

[0686] Transfersomes are yet another type of liposomes, and are highly deformable lipid aggregates which are attractive candidates for drug delivery vehicles. Transfersomes can be described as lipid droplets which are so highly deformable that they are easily able to penetrate through pores which are smaller than the droplet. Transfersomes are adaptable to the environment in which they are used, e.g., they are self-optimizing (adaptive to the shape of pores in the skin), self-repairing, frequently reach their targets without fragmenting, and often self-loading. To make transfersomes it is possible to add surface edge-activators, usually surfactants, to a standard liposomal composition. Transfersomes have been used to deliver serum albumin to the skin. The transfersome-mediated delivery of serum albumin has been shown to be as effective as subcutaneous injection of a solution containing serum albumin.

[0687] Surfactants find wide application in formulations such as emulsions (including microemulsions) and liposomes. The most common way of classifying and ranking the properties of the many different types of surfactants, both natural and synthetic, is by the use of the hydrophile/lipophile balance (HLB). The nature of the hydrophilic group (also known as the “head”) provides the most useful means for categorizing the different surfactants used in formulations (Rieger, in Pharmaceutical Dosage Forms, Marcel Dekker, Inc., New York, N.Y., 1988, p. 285).

[0688] If the surfactant molecule is not ionized, it is classified as a nonionic surfactant. Nonionic surfactants find wide application in pharmaceutical and cosmetic products and are usable over a wide range of pH values. In general their HLB values range from 2 to about 18 depending on their structure. Nonionic surfactants include nonionic esters such as ethylene glycol esters, propylene glycol esters, glyceryl esters, polyglyceryl esters, sorbitan esters, sucrose esters, and ethoxylated esters. Nonionic alkanolamides and ethers such as fatty alcohol ethoxylates, propoxylated alcohols, and ethoxylated/propoxylated block polymers are also included in this class. The polyoxyethylene surfactants are the most popular members of the nonionic surfactant class.

[0689] If the surfactant molecule carries a negative charge when it is dissolved or dispersed in water, the surfactant is classified as anionic. Anionic surfactants include carboxylates such as soaps, acyl lactylates, acyl amides of amino acids, esters of sulfuric acid such as alkyl sulfates and ethoxylated alkyl sulfates, sulfonates such as alkyl benzene sulfonates, acyl isethionates, acyl taurates and sulfosuccinates, and phosphates. The most important members of the anionic surfactant class are the alkyl sulfates and the soaps.

[0690] If the surfactant molecule carries a positive charge when it is dissolved or dispersed in water, the surfactant is classified as cationic. Cationic surfactants include quaternary ammonium salts and ethoxylated amines. The quaternary ammonium salts are the most used members of this class.

[0691] If the surfactant molecule has the ability to carry either a positive or negative charge, the surfactant is classified as amphoteric. Amphoteric surfactants include acrylic acid derivatives, substituted alkylamides, N-alkylbetaines and phosphatides.

[0692] The use of surfactants in drug products, formulations and in emulsions has been reviewed (Rieger, in Pharmaceutical Dosage Forms, Marcel Dekker, Inc., New York, N.Y., 1988, p. 285).

[0693] The iRNA for use in the methods of the invention can also be provided as micellar formulations. “Micelles” are defined herein as a particular type of molecular assembly in which amphipathic molecules are arranged in a spherical structure such that all the hydrophobic portions of the molecules are directed inward, leaving the hydrophilic portions in contact with the surrounding aqueous phase. The converse arrangement exists if the environment is hydrophobic.

[0694] A mixed micellar formulation suitable for delivery through transdermal membranes may be prepared by mixing an aqueous solution of the siRNA composition, an alkali metal Cₛ to C₂₂ alkyl sulphate, and a micelle forming compounds. Exemplary micelle forming compounds include lecithin, hyaluronic acid, pharmaceutically acceptable salts of hyaluronic acid, glycolic acid, lactic acid, chamomile extract, cucumber extract, oleic acid, linoleic acid, linolenic acid, monoolein, monooleates, monolaurates, borage oil, evening of primrose oil, menthol, trihydroxy oxo cholanyl glycine and pharmaceutically acceptable salts thereof, glycerin, polyglycerin, lysine, polylysine, triolein, polyoxyethylene ethers and analogues thereof, polidocanol alkyl ethers and analogues thereof, chenodeoxycholate, deoxycholate, and mixtures thereof. The micelle forming compounds may be added at the same time or after addition of the alkali metal alkyl sulphate. Mixed micelles will form with substantially any kind of mixing of the ingredients but vigorous mixing in order to provide smaller size micelles.

[0695] In one method a first micellar composition is prepared which contains the siRNA composition and at least the alkali metal alkyl sulphate. The first micellar composition is then mixed with at least three micelle forming compounds to form a mixed micellar composition. In another method, the micellar composition is prepared by mixing the siRNA composition, the alkali metal alkyl sulphate and at least one of the micelle forming compounds, followed by addition of the remaining micelle forming compounds, with vigorous mixing.

[0696] Phenol and/or m-cresol may be added to the mixed micellar composition to stabilize the formulation and protect against bacterial growth. Alternatively, phenol and/or m-cresol may be added with the micelle forming ingredients. An isotonic agent such as glycerin may also be added after formation of the mixed micellar composition.

[0697] For delivery of the micellar formulation as a spray, the formulation can be put into an aerosol dispenser and the dispenser is charged with a propellant. The propellant, which is under pressure, is in liquid form in the dispenser. The ratios of the ingredients are adjusted so that the aqueous and propellant phases become one, i.e., there is one phase. If there are two phases, it is necessary to shake the dispenser prior to dispensing a portion of the contents, e.g., through a metered valve. The dispensed dose of pharmaceutical agent is propelled from the metered valve in a fine spray.

[0698] Propellants may include hydrogen-containing chlorofluorocarbons, hydrogen-containing fluorocarbons, dimethyl ether and diethyl ether. In certain embodiments, HFA 134a (1,1,1,2 tetrafluoroethane) may be used.

[0699] The specific concentrations of the essential ingredients can be determined by relatively straightforward experimentation. For absorption through the oral cavities, it is often desirable to increase, e.g., at least double or triple, the dosage for through injection or administration through the gastrointestinal tract.

### B. Lipid Particles

[0700] iRNAs, e.g., dsRNAs of in the invention may be fully encapsulated in a lipid formulation, e.g., a LNP, e.g., to form a SPLP, pSPLP, SNALP, or other nucleic acid-lipid particle.

[0701] As used herein, the term “SNALP” refers to a stable nucleic acid-lipid particle, including SPLP. As used herein, the term “SPLP” refers to a nucleic acid-lipid particle comprising plasmid DNA encapsulated within a lipid vesicle. SNALPs and SPLPs typically contain a cationic lipid, a non-cationic lipid, and a lipid that prevents aggregation of the particle (e.g., a PEG-lipid conjugate). SNALPs and SPLPs are extremely useful for systemic applications, as they exhibit extended circulation lifetimes following intravenous (i.v.) injection and accumulate at distal sites (e.g., sites physically separated from the administration site). SPLPs include “pSPLP,” which include an encapsulated condensing agent-nucleic acid complex as set forth in PCT Publication No. WO 00/03683. The particles of the present invention typically have a mean diameter of about 50 nm to about 150 nm, more typically about 60 nm to about 130 nm, more typically about 70 nm to about 110 nm, most typically about 70 nm to about 90 nm, and are substantially nontoxic. In addition, the nucleic acids when present in the nucleic acid-lipid particles of the present invention are resistant in aqueous solution to degradation with a nuclease. Nucleic acid-lipid particles and their method of preparation are disclosed in, e.g., U.S. Pat. Nos. 5,976,567; 5,981,501; 6,534,484; 6,586,410; 6,815,432; U.S. Publication No. 2010/0324120 and PCT Publication No. WO 96/40964.

[0702] In one embodiment, the lipid to drug ratio (mass/mass ratio) (e.g., lipid to dsRNA ratio) will be in the range of from about 1:1 to about 50:1, from about 1:1 to about 25:1, from about 3:1 to about 15:1, from about 4:1 to about 10:1, from about 5:1 to about 9:1, or about 6:1 to about 9:1. Ranges intermediate to the above recited ranges are also contemplated to be part of the invention.

[0703] The cationic lipid can be, for example, N,N-dioleyl-N,N-dimethylammonium chloride (DODAC), N,N-distearyl-N,N-dimethylammonium bromide (DDAB), N—(I-(2,3-dioleoyloxy)propyl)-N,N,N-trimethylammonium chloride (DOTAP), N—(I-(2,3-dioleyloxy)propyl)-N,N,N-trimethylammonium chloride (DOTMA), N,N-dimethyl-2,3-dioleyloxy)propylamine (DODMA), 1,2-DiLinoleyloxy-N,N-dimethylaminopropane (DLinDMA), 1,2-Dilinolenyloxy-N,N-dimethylaminopropane (DLenDMA), 1,2-Dilinoleylcarbamoyloxy-3-dimethylaminopropane (DLin-C-DAP), 1,2-Dilinoleyoxy-3-(dimethylamino)acetoxypropane (DLin-DAC), 1,2-Dilinoleoyl-3-morpholinopropane (DLin-MA), 1,2-Dilinoleoyl-3-dimethylaminopropane (DLinDAP), 1,2-Dilinoleylthio-3-dimethylaminopropane (DLin-S-DMA), 1-Linoleoyl-2-linoleyloxy-3-dimethylaminopropane (DLin-2-DMAP), 1,2-Dilinoleyloxy-3-trimethylaminopropane chloride salt (DLin-TMA.Cl), 1,2-Dilinoleoyl-3-trimethylaminopropane chloride salt (DLin-TAP.Cl), 1,2-Dilinoleyloxy-3-(N-methylpiperazino)propane (DLin-MPZ), or 3-(N,N-Dilinoleylamino)-1,2-propanediol (DLinAP), 3-(N,N-Dioleylamino)-1,2-propanedio (DOAP), 1,2-Dilinoleyloxo-3-(2-N,N-dimethylamino)ethoxypropane (DLin-EG-DMA), 1,2-Dilinolenyloxy-N,N-dimethylaminopropane (DLinDMA), 2,2-Dilinoleyl-4-dimethylaminomethyl-[1,3]-dioxolane (DLin-K-DMA) or analogs thereof, (3aR,5s,6aS)—N,N-dimethyl-2,2-di((9Z,12Z)-octadeca-9,12-dienyl)tetrahydro-3aH-cyclopenta[d][1,3]dioxol-5-amine (ALN100), (6Z,9Z,28Z,31Z)-heptatriaconta-6,9,28,31-tetraen-19-yl 4-(dimethylamino)butanoate (MC3), 1,1′-(2-(4-(2-((2-(bis(2-hydroxydodecyl)amino)ethyl)(2-hydroxydodecyl)amino)ethyl)piperazin-1-yl)ethylazanediyl)didodecan-2-ol (Tech G1), or a mixture thereof. The cationic lipid can comprise from about 20 mol % to about 50 mol % or about 40 mol % of the total lipid present in the particle.

[0704] In another embodiment, the compound 2,2-Dilinoleyl-4-dimethylaminoethyl-[1,3]-dioxolane can be used to prepare lipid-siRNA nanoparticles. Synthesis of 2,2-Dilinoleyl-4-dimethylaminoethyl-[1,3]-dioxolane is described in U.S. provisional patent application No. 61/107,998 filed on Oct. 23, 2008, which is herein incorporated by reference.

[0705] In one embodiment, the lipid-siRNA particle includes 40% 2, 2-Dilinoleyl-4-dimethylaminoethyl-[1,3]-dioxolane: 10% DSPC: 40% Cholesterol: 10% PEG-C-DOMG (mole percent) with a particle size of 63.0±20 nm and a 0.027 siRNA/Lipid Ratio.

[0706] The ionizable/non-cationic lipid can be an anionic lipid or a neutral lipid including, but not limited to, distearoylphosphatidylcholine (DSPC), dioleoylphosphatidylcholine (DOPC), dipalmitoylphosphatidylcholine (DPPC), dioleoylphosphatidylglycerol (DOPG), dipalmitoylphosphatidylglycerol (DPPG), dioleoyl-phosphatidylethanolamine (DOPE), palmitoyloleoylphosphatidylcholine (POPC), palmitoyloleoylphosphatidylethanolamine (POPE), dioleoyl-phosphatidylethanolamine 4-(N-maleimidomethyl)-cyclohexane-l-carboxylate (DOPE-mal), dipalmitoyl phosphatidyl ethanolamine (DPPE), dimyristoylphosphoethanolamine (DMPE), distearoyl-phosphatidyl-ethanolamine (DSPE), 16-O-monomethyl PE, 16-O-dimethyl PE, 18-1-trans PE, 1-stearoyl-2-oleoyl-phosphatidylethanolamine (SOPE), cholesterol, or a mixture thereof. The non-cationic lipid can be from about 5 mol % to about 90 mol %, about 10 mol %, or about 58 mol % if cholesterol is included, of the total lipid present in the particle.

[0707] The conjugated lipid that inhibits aggregation of particles can be, for example, a polyethyleneglycol (PEG)-lipid including, without limitation, a PEG-diacylglycerol (DAG), a PEG-dialkyloxypropyl (DAA), a PEG-phospholipid, a PEG-ceramide (Cer), or a mixture thereof. The PEG-DAA conjugate can be, for example, a PEG-dilauryloxypropyl (Ci₂), a PEG-dimyristyloxypropyl (Ci₄), a PEG-dipalmityloxypropyl (Ci₆), or a PEG-distearyloxypropyl (C)₈. The conjugated lipid that prevents aggregation of particles can be from 0 mol % to about 20 mol % or about 2 mol % of the total lipid present in the particle.

[0708] In some embodiments, the nucleic acid-lipid particle further includes cholesterol at, e.g., about 10 mol % to about 60 mol % or about 48 mol % of the total lipid present in the particle.

[0709] In one embodiment, the lipidoid ND98-4HCl (MW 1487) (see U.S. patent application Ser. No. 12/056,230, filed Mar. 26, 2008, which is incorporated herein by reference), Cholesterol (Sigma-Aldrich), and PEG-Ceramide C16 (Avanti Polar Lipids) can be used to prepare lipid-dsRNA nanoparticles (i.e., LNP01 particles).

[0710] In certain embodiments of the invention, suitable cationic lipids suitable for use in the compositions of the invention are those described in U.S. Pat. No. 9,061,063, and PCT Publication No. WO 2013/086354, the entire contents of each of which are incorporated herein by reference. In some embodiments, suitable cationic lipids include one or more biodegradable groups. The biodegradable group(s) include one or more bonds that may undergo bond breaking reactions in a biological environment, e.g., in an organism, organ, tissue, cell, or organelle. Functional groups that contain a biodegradable bond include, for example, esters, dithiols, and oximes. Biodegradation can be a factor that influences the clearance of the compound from the body when administered to a subject. Biodegredation can be measured in a cell based assay, where a formulation including a cationic lipid is exposed to cells, and samples are taken at various time points. The lipid fractions can be extracted from the cells and separated and analyzed by LC-MS. From the LC-MS data, rates of biodegradation (e.g., as t½ values) can be measured. the cationic lipd comprises a biodegradable group.

[0711] In one embodiment, a cationic lipid of any of the embodiments described herein has an in vivo half life (t1/2) (e.g., in the liver, spleen or plasma) of less than about 3 hours, such as less than about 2.5 hours, less than about 2 hours, less than about 1.5 hours, less than about 1 hour, less than about 0.5 hour or less than about 0.25 hours. The cationic lipid preferably remains intact, or has a half-life sufficient to form a stable lipid nanoparticle which effectively delivers the desired active pharmaceutical ingredient (e.g., a nucleic acid) to its target but thereafter rapidly degrades to minimize any side effects to the subject. For instance, in mice, the cationic lipid preferably has a t1/2 in the spleen of from about 1 to about 7 hours.

[0712] In another embodiment, a cationic lipid of any of the embodiments described herein containing a biodegradable group or groups has an in vivo half life (t1/2) (e.g., in the liver, spleen or plasma) of less than about 10% (e.g., less than about 7.5%, less than about 5%, less than about 2.5%) of that for the same cationic lipid without the biodegrable group or groups.

[0713] Representative cationic lipids include, but are not limited to:

[chemical structure]

[chemical structure]

[chemical structure]

[chemical structure]

[chemical structure]

[chemical structure]

[chemical structure]

[chemical structure]

[chemical structure]

[chemical structure]

[chemical structure]

[chemical structure]

[chemical structure]

[chemical structure]

[chemical structure]

[chemical structure]

[chemical structure]

[chemical structure]

[0714] In one preferred embodiment, the cationic lipid is

[chemical structure]

[0715] In certain embodiments, the dsRNA agents of the invention are formulated with a cationic

[chemical structure]

lipid, e.g., distearoylphosphatidylcholine (DSPC), cholesterol (Chol), and 1,2-Dimyristoyl-rac-glycero-3-methoxypolyethylene glycol (PEG-DMG). In one embodiment, the ratio of

[chemical structure]

DSPC:Chol:PEG-DMG is about 50:12:36:2, respectively.

[0716] Included in the present invention is the free form of the cationic lipids described herein, as well as pharmaceutically acceptable salts and stereoisomers thereof. The cationic lipid can be a protonated salt of the amine cationic lipid. The term “free form” refers to the amine cationic lipids in non-salt form. The free form may be regenerated by treating the salt with a suitable dilute aqueous base solution such as dilute aqueous NaOH, potassium carbonate, ammonia and sodium bicarbonate.

[0717] The pharmaceutically acceptable salts of the instant cationic lipids can be synthesized from the cationic lipids of this invention which contain a basic or acidic moiety by conventional chemical methods. Generally, the salts of the basic cationic lipids are prepared either by ion exchange chromatography or by reacting the free base with stoichiometric amounts or with an excess of the desired salt-forming inorganic or organic acid in a suitable solvent or various combinations of solvents. Similarly, the salts of the acidic compounds are formed by reactions with the appropriate inorganic or organic base.

[0718] Thus, pharmaceutically acceptable salts of the cationic lipids of this invention include non-toxic salts of the cationic lipids of this invention as formed by reacting a basic instant cationic lipids with an inorganic or organic acid. For example, non-toxic salts include those derived from inorganic acids such as hydrochloric, hydrobromic, sulfuric, sulfamic, phosphoric, nitric and the like, as well as salts prepared from organic acids such as acetic, propionic, succinic, glycolic, stearic, lactic, malic, tartaric, citric, ascorbic, pamoic, maleic, hydroxymaleic, phenylacetic, glutamic, benzoic, salicylic, sulfanilic, 2-acetoxy-benzoic, fumaric, toluenesulfonic, methanesulfonic, ethane disulfonic, oxalic, isethionic, and trifluoroacetic (TFA).

[0719] When the cationic lipids of the present invention are acidic, suitable “pharmaceutically acceptable salts” refers to salts prepared form pharmaceutically acceptable non-toxic bases including inorganic bases and organic bases. Salts derived from inorganic bases include aluminum, ammonium, calcium, copper, ferric, ferrous, lithium, magnesium, manganic salts, manganous, potassium, sodium, and zinc. In one embodiment, the base is selected from ammonium, calcium, magnesium, potassium and sodium. Salts derived from pharmaceutically acceptable organic non-toxic bases include salts of primary, secondary and tertiary amines, substituted amines including naturally occurring substituted amines, cyclic amines and basic ion exchange resins, such as arginine, betaine caffeine, choline, N,N′-dibenzylethylenediamine, diethylamin, 2-diethylaminoethanol, 2-dimethylaminoethanol, ethanolamine, ethylenediamine, N-ethylmorpholine, N-ethylpiperidine, glucamine, glucosamine, histidine, hydrabamine, isopropylamine, lysine, methylglucamine, morpholine, piperazine, piperidine, polyamine resins, procaine, purines, theobromine, triethylamine, trimethylamine tripropylamine, and tromethamine.

[0720] It will also be noted that the cationic lipids of the present invention may potentially be internal salts or zwitterions, since under physiological conditions a deprotonated acidic moiety in the compound, such as a carboxyl group, may be anionic, and this electronic charge might then be balanced off internally against the cationic charge of a protonated or alkylated basic moiety, such as a quaternary nitrogen atom.

### C. Additional Formulations

[0721] i. Emulsions

[0722] The compositions of the present invention can be prepared and formulated as emulsions. Emulsions are typically heterogeneous systems of one liquid dispersed in another in the form of droplets usually exceeding 0.1 μm in diameter (see e.g., Ansel's Pharmaceutical Dosage Forms and Drug Delivery Systems, Allen, L V., Popovich N G., and Ansel H C., 2004, Lippincott Williams & Wilkins (8th ed.), New York, NY; Idson, in Pharmaceutical Dosage Forms, Lieberman, Rieger and Banker (Eds.), 1988, Marcel Dekker, Inc., New York, N.Y., volume 1, p. 199; Rosoff, in Pharmaceutical Dosage Forms, Lieberman, Rieger and Banker (Eds.), 1988, Marcel Dekker, Inc., New York, N.Y., Volume 1, p. 245; Block in Pharmaceutical Dosage Forms, Lieberman, Rieger and Banker (Eds.), 1988, Marcel Dekker, Inc., New York, N.Y., volume 2, p. 335; Higuchi et al., in Remington's Pharmaceutical Sciences, Mack Publishing Co., Easton, Pa., 1985, p. 301). Emulsions are often biphasic systems comprising two immiscible liquid phases intimately mixed and dispersed with each other. In general, emulsions can be of either the water-in-oil (w/o) or the oil-in-water (o/w) variety. When an aqueous phase is finely divided into and dispersed as minute droplets into a bulk oily phase, the resulting composition is called a water-in-oil (w/o) emulsion. Alternatively, when an oily phase is finely divided into and dispersed as minute droplets into a bulk aqueous phase, the resulting composition is called an oil-in-water (o/w) emulsion. Emulsions can contain additional components in addition to the dispersed phases, and the active drug which can be present as a solution either in the aqueous phase, oily phase or itself as a separate phase. Pharmaceutical excipients such as emulsifiers, stabilizers, dyes, and anti-oxidants can also be present in emulsions as needed. Pharmaceutical emulsions can also be multiple emulsions that are comprised of more than two phases such as, for example, in the case of oil-in-water-in-oil (o/w/o) and water-in-oil-in-water (w/o/w) emulsions. Such complex formulations often provide certain advantages that simple binary emulsions do not. Multiple emulsions in which individual oil droplets of an o/w emulsion enclose small water droplets constitute a w/o/w emulsion. Likewise a system of oil droplets enclosed in globules of water stabilized in an oily continuous phase provides an o/w/o emulsion.

[0723] Emulsions are characterized by little or no thermodynamic stability. Often, the dispersed or discontinuous phase of the emulsion is well dispersed into the external or continuous phase and maintained in this form through the means of emulsifiers or the viscosity of the formulation. Other means of stabilizing emulsions entail the use of emulsifiers that can be incorporated into either phase of the emulsion. Emulsifiers can broadly be classified into four categories: synthetic surfactants, naturally occurring emulsifiers, absorption bases, and finely dispersed solids (see e.g., Ansel's Pharmaceutical Dosage Forms and Drug Delivery Systems, Allen, L V., Popovich N G., and Ansel H C., 2004, Lippincott Williams & Wilkins (8th ed.), New York, NY; Idson, in Pharmaceutical Dosage Forms, Lieberman, Rieger and Banker (Eds.), 1988, Marcel Dekker, Inc., New York, N.Y., volume 1, p. 199).

[0724] Synthetic surfactants, also known as surface active agents, have found wide applicability in the formulation of emulsions and have been reviewed in the literature (see e.g., Ansel's Pharmaceutical Dosage Forms and Drug Delivery Systems, Allen, L V., Popovich N G., and Ansel H C., 2004, Lippincott Williams & Wilkins (8th ed.), New York, NY; Rieger, in Pharmaceutical Dosage Forms, Lieberman, Rieger and Banker (Eds.), 1988, Marcel Dekker, Inc., New York, N.Y., volume 1, p. 285; Idson, in Pharmaceutical Dosage Forms, Lieberman, Rieger and Banker (Eds.), Marcel Dekker, Inc., New York, N.Y., 1988, volume 1, p. 199). Surfactants are typically amphiphilic and comprise a hydrophilic and a hydrophobic portion. The ratio of the hydrophilic to the hydrophobic nature of the surfactant has been termed the hydrophile/lipophile balance (HLB) and is a valuable tool in categorizing and selecting surfactants in the preparation of formulations. Surfactants can be classified into different classes based on the nature of the hydrophilic group: nonionic, anionic, cationic, and amphoteric (see e.g., Ansel's Pharmaceutical Dosage Forms and Drug Delivery Systems, Allen, L V., Popovich N G., and Ansel H C., 2004, Lippincott Williams & Wilkins (8th ed.), New York, NY Rieger, in Pharmaceutical Dosage Forms, Lieberman, Rieger and Banker (Eds.), 1988, Marcel Dekker, Inc., New York, N.Y., volume 1, p. 285).

[0725] A large variety of non-emulsifying materials are also included in emulsion formulations and contribute to the properties of emulsions. These include fats, oils, waxes, fatty acids, fatty alcohols, fatty esters, humectants, hydrophilic colloids, preservatives, and antioxidants (Block, in Pharmaceutical Dosage Forms, Lieberman, Rieger and Banker (Eds.), 1988, Marcel Dekker, Inc., New York, N.Y., volume 1, p. 335; Idson, in Pharmaceutical Dosage Forms, Lieberman, Rieger and Banker (Eds.), 1988, Marcel Dekker, Inc., New York, N.Y., volume 1, p. 199).

[0726] The application of emulsion formulations via dermatological, oral, and parenteral routes, and methods for their manufacture have been reviewed in the literature (see e.g., Ansel's Pharmaceutical Dosage Forms and Drug Delivery Systems, Allen, L V., Popovich N G., and Ansel H C., 2004, Lippincott Williams & Wilkins (8th ed.), New York, NY; Idson, in Pharmaceutical Dosage Forms, Lieberman, Rieger and Banker (Eds.), 1988, Marcel Dekker, Inc., New York, N.Y., volume 1, p. 199).

ii. Microemulsions

[0727] In one embodiment of the present invention, the compositions of iRNAs and nucleic acids are formulated as microemulsions. A microemulsion can be defined as a system of water, oil, and amphiphile which is a single optically isotropic and thermodynamically stable liquid solution (see e.g., Ansel's Pharmaceutical Dosage Forms and Drug Delivery Systems, Allen, L V., Popovich N G., and Ansel H C., 2004, Lippincott Williams & Wilkins (8th ed.), New York, NY; Rosoff, in Pharmaceutical Dosage Forms, Lieberman, Rieger and Banker (Eds.), 1988, Marcel Dekker, Inc., New York, N.Y., volume 1, p. 245). Typically microemulsions are systems that are prepared by first dispersing an oil in an aqueous surfactant solution and then adding a sufficient amount of a fourth component, generally an intermediate chain-length alcohol to form a transparent system. Therefore, microemulsions have also been described as thermodynamically stable, isotropically clear dispersions of two immiscible liquids that are stabilized by interfacial films of surface-active molecules (Leung and Shah, in: Controlled Release of Drugs: Polymers and Aggregate Systems, Rosoff, M., Ed., 1989, VCH Publishers, New York, pages 185-215).

iii. Microparticles

[0728] An iRNA of the invention may be incorporated into a particle, e.g., a microparticle. Microparticles can be produced by spray-drying, but may also be produced by other methods including lyophilization, evaporation, fluid bed drying, vacuum drying, or a combination of these techniques.

iv. Penetration Enhancers

[0729] In one embodiment, the present invention employs various penetration enhancers to effect the efficient delivery of nucleic acids, particularly iRNAs, to the skin of animals. Most drugs are present in solution in both ionized and nonionized forms. However, usually only lipid soluble or lipophilic drugs readily cross cell membranes. It has been discovered that even non-lipophilic drugs can cross cell membranes if the membrane to be crossed is treated with a penetration enhancer. In addition to aiding the diffusion of non-lipophilic drugs across cell membranes, penetration enhancers also enhance the permeability of lipophilic drugs.

[0730] Penetration enhancers can be classified as belonging to one of five broad categories, i.e., surfactants, fatty acids, bile salts, chelating agents, and non-chelating non-surfactants (see e.g., Malmsten, M. Surfactants and polymers in drug delivery, Informa Health Care, New York, NY, 2002; Lee et al., Critical Reviews in Therapeutic Drug Cater Systems, 1991, p. 92). Each of the above mentioned classes of penetration enhancers and their use in manufacture of pharmaceutical compositions and delivery of pharmaceutical agents are well known in the art.

v. Excipients

[0731] In contrast to a carrier compound, a “pharmaceutical carrier” or “excipient” is a pharmaceutically acceptable solvent, suspending agent, or any other pharmacologically inert vehicle for delivering one or more nucleic acids to an animal. The excipient can be liquid or solid and is selected, with the planned manner of administration in mind, so as to provide for the desired bulk, consistency, etc., when combined with a nucleic acid and the other components of a given pharmaceutical composition. Such agent are well known in the art.

vi. Other Components

[0732] The compositions of the present invention can additionally contain other adjunct components conventionally found in pharmaceutical compositions, at their art-established usage levels. Thus, for example, the compositions can contain additional, compatible, pharmaceutically-active materials such as, for example, antipruritics, astringents, local anesthetics or anti-inflammatory agents, or can contain additional materials useful in physically formulating various dosage forms of the compositions of the present invention, such as dyes, flavoring agents, preservatives, antioxidants, opacifiers, thickening agents and stabilizers. However, such materials, when added, should not unduly interfere with the biological activities of the components of the compositions of the present invention. The formulations can be sterilized and, if desired, mixed with auxiliary agents, e.g., lubricants, preservatives, stabilizers, wetting agents, emulsifiers, salts for influencing osmotic pressure, buffers, colorings, flavorings, or aromatic substances, and the like which do not deleteriously interact with the nucleic acid(s) of the formulation.

[0733] Aqueous suspensions can contain substances which increase the viscosity of the suspension including, for example, sodium carboxymethylcellulose, sorbitol, or dextran. The suspension can also contain stabilizers.

[0734] In some embodiments, pharmaceutical compositions featured in the invention include (a) one or more iRNA and (b) one or more agents which function by a non-iRNA mechanism and which are useful in treating a CTNNB13-associated disorder, e.g., a cancer.

[0735] Toxicity and prophylactic efficacy of such compounds can be determined by standard pharmaceutical procedures in cell cultures or experimental animals, e.g., for determining the LD50 (the dose lethal to 50% of the population) and the ED50 (the dose prophylactically effective in 50% of the population). The dose ratio between toxic and therapeutic effects is the therapeutic index and it can be expressed as the ratio LD50/ED50. Compounds that exhibit high therapeutic indices are preferred.

[0736] The data obtained from cell culture assays and animal studies can be used in formulating a range of dosage for use in humans. The dosage of compositions featured herein in the invention lies generally within a range of circulating concentrations that include the ED50, such as, an ED80 or ED90, with little or no toxicity. The dosage can vary within this range depending upon the dosage form employed and the route of administration utilized. For any compound used in the methods featured in the invention, the prophylactically effective dose can be estimated initially from cell culture assays. A dose can be formulated in animal models to achieve a circulating plasma concentration range of the compound or, when appropriate, of the polypeptide product of a target sequence (e.g., achieving a decreased concentration of the polypeptide) that includes the IC50 (i.e., the concentration of the test compound which achieves a half-maximal inhibition of symptoms) or higher levels of inhibition as determined in cell culture. Such information can be used to more accurately determine useful doses in humans. Levels in plasma can be measured, for example, by high performance liquid chromatography.

[0737] In addition to their administration, as discussed above, the iRNAs featured in the invention can be administered in combination with other known agents used for the prevention or treatment of a CTNNB1-associated disorder, e.g., cancer. In any event, the administering physician can adjust the amount and timing of iRNA administration on the basis of results observed using standard measures of efficacy known in the art or described herein.

### VI. Methods for Inhibiting CTNNB1 Expression

[0738] The present invention also provides methods of inhibiting expression of a CTNNB1 gene in a cell. The methods include contacting a cell with an RNAi agent, e.g., double stranded RNA agent, in an amount effective to inhibit expression of CTNNB1 in the cell, thereby inhibiting expression of CTNNB1 in the cell. In some embodiments of the disclosure, expression of a CTNNB1 gene is inhibited preferentially in the liver (e.g., hepatocytes).

[0739] Contacting of a cell with an iRNA, e.g., a double stranded RNA agent, may be done in vitro or in vivo. Contacting a cell in vivo with the iRNA includes contacting a cell or group of cells within a subject, e.g., a human subject, with the iRNA. Combinations of in vitro and in vivo methods of contacting a cell are also possible. Contacting a cell may be direct or indirect, as discussed above. Furthermore, contacting a cell may be accomplished via a targeting ligand, including any ligand described herein or known in the art. In some embodiments, the targeting ligand is a carbohydrate moiety, e.g., a GalNAc₃ ligand, or any other ligand that directs the RNAi agent to a site of interest.

[0740] The term “inhibiting,” as used herein, is used interchangeably with “reducing,” “silencing,” “downregulating”, “suppressing”, and other similar terms, and includes any level of inhibition.

[0741] The phrase “inhibiting expression of a CTNNB1” is intended to refer to inhibition of expression of any CTNNB1 gene (such as, e.g., a mouse CTNNB1 3 gene, a rat CTNNB1 gene, a monkey CTNNB1 gene, or a human CTNNB1 gene) as well as variants or mutants of a CTNNB1 gene. Thus, the CTNNB1 gene may be a wild-type CTNNB1 gene, a mutant CTNNB1 gene, or a transgenic CTNNB1 gene in the context of a genetically manipulated cell, group of cells, or organism.

[0742] “Inhibiting expression of a CTNNB1 gene” includes any level of inhibition of a CTNNB1 gene, e.g., at least partial suppression of the expression of a CTNNB1 gene. The expression of the CTNNB1 gene may be assessed based on the level, or the change in the level, of any variable associated with CTNNB1 gene expression, e.g., CTNNB1 mRNA level or CTNNB1 protein level. It is understood that CTNNB1 is expressed predominantly in the liver.

[0743] The expression of a CTNNB1 may also be assessed indirectly based on other variables associated with CTNNB1 gene expression, e.g., level of beta-catenin expression in the cytoplasma, nuclear localization of beta-catenin, or expression of certain target genes such as Jun, c-Myc and CyclinD-1 or other oncogenes under transcription control of beta-catenin.

[0744] Inhibition may be assessed by a decrease in an absolute or relative level of one or more variables that are associated with CTNNB1 expression compared with a control level. The control level may be any type of control level that is utilized in the art, e.g., a pre-dose baseline level, or a level determined from a similar subject, cell, or sample that is untreated or treated with a control (such as, e.g., buffer only control or inactive agent control).

[0745] In some embodiments of the methods of the invention, expression of a CTNNB1 gene is inhibited by at least 50%, 55%, 60%, 65%, 70%, 75%, 80%, 85%, 90%, or 95%, or to below the level of detection of the assay. In some embodiments, expression of a CTNNB1 gene is inhibited by at least 70%. It is further understood that inhibition of CTNNB1 expression in certain tissues, e.g., in liver, without a significant inhibition of expression in other tissues, e.g., brain, may be desirable. In some embodiments, expression level is determined using the assay method provided in Example 2 with a 10 nM siRNA concentration in the appropriate species matched cell line.

[0746] In certain embodiments, inhibition of expression in vivo is determined by knockdown of the human gene in a rodent expressing the human gene, e.g., an AAV-infected mouse expressing the human target gene (i.e., CTNNB1), e.g., when administered as a single dose, e.g., at 3 mg/kg at the nadir of RNA expression. Knockdown of expression of an endogenous gene in a model animal system can also be determined, e.g., after administration of a single dose at, e.g., 3 mg/kg at the nadir of RNA expression. Such systems are useful when the nucleic acid sequence of the human gene and the model animal gene are sufficiently close such that the human iRNA provides effective knockdown of the model animal gene. RNA expression in liver is determined using the PCR methods provided in Example 2.

[0747] Inhibition of the expression of a CTNNB1 gene may be manifested by a reduction of the amount of mRNA expressed by a first cell or group of cells (such cells may be present, for example, in a sample derived from a subject) in which a CTNNB1 gene is transcribed and which has or have been treated (e.g., by contacting the cell or cells with an iRNA of the invention, or by administering an iRNA of the invention to a subject in which the cells are or were present) such that the expression of a CTNNB1 gene is inhibited, as compared to a second cell or group of cells substantially identical to the first cell or group of cells but which has not or have not been so treated (control cell(s) not treated with an iRNA or not treated with an iRNA targeted to the gene of interest). In some embodiments, the inhibition is assessed by the method provided in Example 2 using a 10 nM siRNA concentration in the species matched cell line and expressing the level of mRNA in treated cells as a percentage of the level of mRNA in control cells, using the following formula:

$$\frac{( mRNA in control cells ) - ( mRNA in treated cells )}{( mRNA in control cells )} \cdot 100 \%$$

[0748] In other embodiments, inhibition of the expression of a CTNNB1 gene may be assessed in terms of a reduction of a parameter that is functionally linked to CTNNB1 gene expression, e.g., CTNNB1 protein level in blood or serum from a subject. CTNNB1 gene silencing may be determined in any cell expressing CTNNB1, either endogenous or heterologous from an expression construct, and by any assay known in the art.

[0749] Inhibition of the expression of a CTNNB1 protein may be manifested by a reduction in the level of the CTNNB1 protein that is expressed by a cell or group of cells or in a subject sample (e.g., the level of protein in a blood sample derived from a subject). As explained above, for the assessment of mRNA suppression, the inhibition of protein expression levels in a treated cell or group of cells may similarly be expressed as a percentage of the level of protein in a control cell or group of cells, or the change in the level of protein in a subject sample, e.g., blood or serum derived therefrom.

[0750] A control cell, a group of cells, or subject sample that may be used to assess the inhibition of the expression of a CTNNB1 gene includes a cell, group of cells, or subject sample that has not yet been contacted with an RNAi agent of the invention. For example, the control cell, group of cells, or subject sample may be derived from an individual subject (e.g., a human or animal subject) prior to treatment of the subject with an RNAi agent or an appropriately matched population control.

[0751] The level of CTNNB1 mRNA that is expressed by a cell or group of cells may be determined using any method known in the art for assessing mRNA expression. In one embodiment, the level of expression of CTNNB1 in a sample is determined by detecting a transcribed polynucleotide, or portion thereof, e.g., mRNA of the CTNNB1 gene. RNA may be extracted from cells using RNA extraction techniques including, for example, using acid phenol/guanidine isothiocyanate extraction (RNAzol B; Biogenesis), RNeasy™ RNA preparation kits (Qiagen®) or PAXgene™ (PreAnalytix™, Switzerland). Typical assay formats utilizing ribonucleic acid hybridization include nuclear run-on assays, RT-PCR, RNase protection assays, northern blotting, in situ hybridization, and microarray analysis.

[0752] In some embodiments, the level of expression of CTNNB1 is determined using a nucleic acid probe. The term “probe”, as used herein, refers to any molecule that is capable of selectively binding to a specific CTNNB1. Probes can be synthesized by one of skill in the art, or derived from appropriate biological preparations. Probes may be specifically designed to be labeled. Examples of molecules that can be utilized as probes include, but are not limited to, RNA, DNA, proteins, antibodies, and organic molecules.

[0753] Isolated mRNA can be used in hybridization or amplification assays that include, but are not limited to, Southern or northern analyses, polymerase chain reaction (PCR) analyses and probe arrays. One method for the determination of mRNA levels involves contacting the isolated mRNA with a nucleic acid molecule (probe) that can hybridize to CTNNB1 mRNA. In one embodiment, the mRNA is immobilized on a solid surface and contacted with a probe, for example by running the isolated mRNA on an agarose gel and transferring the mRNA from the gel to a membrane, such as nitrocellulose. In an alternative embodiment, the probe(s) are immobilized on a solid surface and the mRNA is contacted with the probe(s), for example, in an Affymetrix® gene chip array. A skilled artisan can readily adapt known mRNA detection methods for use in determining the level of CTNNB1 mRNA.

[0754] An alternative method for determining the level of expression of CTNNB1 in a sample involves the process of nucleic acid amplification or reverse transcriptase (to prepare cDNA) of for example mRNA in the sample, e.g., by RT-PCR (the experimental embodiment set forth in Mullis, 1987, U.S. Pat. No. 4,683,202), ligase chain reaction (Barany (1991) Proc. Natl. Acad. Sci. USA 88:189-193), self sustained sequence replication (Guatelli et al. (1990) Proc. Natl. Acad. Sci. USA 87:1874-1878), transcriptional amplification system (Kwoh et al. (1989) Proc. Natl. Acad. Sci. USA 86:1173-1177), Q-Beta Replicase (Lizardi et al. (1988) Bio Technology 6:1197), rolling circle replication (Lizardi et al., U.S. Pat. No. 5,854,033) or any other nucleic acid amplification method, followed by the detection of the amplified molecules using techniques well known to those of skill in the art. These detection schemes are especially useful for the detection of nucleic acid molecules if such molecules are present in very low numbers. In particular aspects of the invention, the level of expression of CTNNB1 is determined by quantitative fluorogenic RT-PCR (i.e., the TaqMan™ System). In some embodiments, expression level is determined by the method provided in Example 2 using, e.g., a 10 nM siRNA concentration, in the species matched cell line.

[0755] The expression levels of CTNNB1 mRNA may be monitored using a membrane blot (such as used in hybridization analysis such as northern, Southern, dot, and the like), or microwells, sample tubes, gels, beads or fibers (or any solid support comprising bound nucleic acids). See U.S. Pat. Nos. 5,770,722, 5,874,219, 5,744,305, 5,677,195 and 5,445,934, which are incorporated herein by reference. The determination of CTNNB1 expression level may also comprise using nucleic acid probes in solution.

[0756] In some embodiments, the level of mRNA expression is assessed using branched DNA (bDNA) assays or real time PCR (qPCR). The use of these methods is described and exemplified in the Examples presented herein. In some embodiments, expression level is determined by the method provided in Example 2 using a 10 nM siRNA concentration in the species matched cell line.

[0757] The level of CTNNB1 protein expression may be determined using any method known in the art for the measurement of protein levels. Such methods include, for example, electrophoresis, capillary electrophoresis, high performance liquid chromatography (HPLC), thin layer chromatography (TLC), hyperdiffusion chromatography, fluid or gel precipitin reactions, absorption spectroscopy, a colorimetric assays, spectrophotometric assays, flow cytometry, immunodiffusion (single or double), immunoelectrophoresis, western blotting, radioimmunoassay (RIA), enzyme-linked immunosorbent assays (ELISAs), immunofluorescent assays, electrochemiluminescence assays, and the like.

[0758] In some embodiments, the efficacy of the methods of the invention are assessed by a decrease in CTNNB1 mRNA or protein level (e.g., in a liver biopsy).

[0759] In some embodiments, the efficacy of the methods of the invention can be monitored by detecting or monitoring a reduction in tumor formation. Reducing tumor, as used herein, includes any decrease in the size, number, or severity of tumor, or to a prevention or reduction in the formation of tumor, within a tissue of a subject, as may be assessed in vitro or in vivo using any method known in the art.

[0760] In some embodiments of the methods of the invention, the iRNA is administered to a subject such that the iRNA is delivered to a specific site within the subject. The inhibition of expression of CTNNB1 may be assessed using measurements of the level or change in the level of CTNNB1 mRNA or CTNNB1 protein in a sample derived from fluid or tissue from the specific site within the subject (e.g., liver or blood).

[0761] As used herein, the terms detecting or determining a level of an analyte are understood to mean performing the steps to determine if a material, e.g., protein, RNA, is present. As used herein, methods of detecting or determining include detection or determination of an analyte level that is below the level of detection for the method used.

### VII. Prophylactic and Treatment Methods of the Invention

[0762] The present invention also provides methods of using an iRNA of the invention or a composition containing an iRNA of the invention to inhibit expression of CTNNB1, thereby preventing or treating a CTNNB1-associated disorder, e.g., cancer, e.g., hepatocellular carcinoma. In the methods of the invention the cell may be contacted with the siRNA in vitro or in vivo, i.e., the cell may be within a subject.

[0763] A cell suitable for treatment using the methods of the invention may be any cell that expresses a CTNNB1 gene, e.g., a liver cell. A cell suitable for use in the methods of the invention may be a mammalian cell, e.g., a primate cell (such as a human cell, including human cell in a chimeric non-human animal, or a non-human primate cell, e.g., a monkey cell or a chimpanzee cell), or a non-primate cell. In certain embodiments, the cell is a human cell, e.g., a human liver cell. In the methods of the invention, CTNNB1 expression is inhibited in the cell by at least 50, 55, 60, 65, 70, 75, 80, 85, 90, or 95, or to a level below the level of detection of the assay.

[0764] The in vivo methods of the invention may include administering to a subject a composition containing an iRNA, where the iRNA includes a nucleotide sequence that is complementary to at least a part of an RNA transcript of the CTNNB1 gene of the mammal to which the RNAi agent is to be administered. The composition can be administered by any means known in the art including, but not limited to oral, intraperitoneal, or parenteral routes, including intracranial (e.g., intraventricular, intraparenchymal, and intrathecal), intravenous, intramuscular, subcutaneous, transdermal, airway (aerosol), nasal, rectal, intraocular (e.g., periocular, conjunctival, subtenon, intracameral, intravitreal, intraocular, anterior or posterior juxtascleral, subretinal, subconjunctival, retrobulbar, or intracanalicular injection), intravenous, intramuscular, subcutaneous, transdermal, airway (aerosol), and topical (including buccal and sublingual) administration.

[0765] In certain embodiments, the compositions are administered by intravenous infusion or injection. In certain embodiments, the compositions are administered by subcutaneous injection. In certain embodiments, the compositions are administered by intramuscular injection.

[0766] The mode of administration may be chosen based upon whether local or systemic treatment is desired and based upon the area to be treated. The route and site of administration may be chosen to enhance targeting.

[0767] In one aspect, the present invention also provides methods for inhibiting the expression of a CTNNB1 gene in a mammal. The methods include administering to the mammal a composition comprising a dsRNA that targets a CTNNB1 gene in a cell of the mammal and maintaining the mammal for a time sufficient to obtain degradation of the mRNA transcript of the CTNNB1 gene, thereby inhibiting expression of the CTNNB1 gene in the cell. Reduction in gene expression can be assessed by any methods known in the art and by methods, e.g. qRT-PCR, described herein, e.g., in Example 2. Reduction in protein production can be assessed by any methods known it the art, e.g. ELISA. In certain embodiments, a puncture liver biopsy sample serves as the tissue material for monitoring the reduction in the CTNNB1 gene or protein expression. In other embodiments, a blood sample serves as the subject sample for monitoring the reduction in the CTNNB1 protein expression.

[0768] The present invention further provides methods of treatment in a subject in need thereof, e.g., a subject diagnosed with a CTNNB1-associated disorder, such as cancer, e.g., hepatocellular carcinoma.

[0769] The present invention further provides methods of prophylaxis in a subject in need thereof.

[0770] The treatment methods of the invention include administering an iRNA of the invention to a subject, e.g., a subject that would benefit from a reduction of CTNNB1 expression, in a prophylactically effective amount of a dsRNA targeting a CTNNB1 gene or a pharmaceutical composition comprising a dsRNA targeting a CTNNB1 gene.

[0771] In one aspect, the present invention provides methods of treating a subject having a disorder that would benefit from reduction in CTNNB1 expression, e.g., a CTNNB1-associated disorder, such as cancer, e.g., hepatocellular carcinoma.

[0772] Treatment of a subject that would benefit from a reduction and/or inhibition of CTNNB1 gene expression includes therapeutic treatment (e.g., a subject is having a cancer) and prophylactic treatment (e.g., the subject is not having a cancer or a subject may be at risk of developing a cancer).

[0773] In some embodiments, the CTNNB1-associated disorder is cancer. Examples of cancer include but are not limited to, carcinoma, lymphoma, blastoma, sarcoma, myeloma and leukemia. In some embodiments, the cancer comprises a solid tumor cancer. In other embodiments, the cancer comprises a blood based cancer, e.g., leukemia, lymphoma or myeloma. More particular nonlimiting examples of such cancers include squamous cell cancer, small-cell lung cancer, pituitary cancer, esophageal cancer, astrocytoma, soft tissue sarcoma, non-small cell lung cancer (including squamous cell non-small cell lung cancer), adenocarcinoma of the lung, squamous carcinoma of the lung, cancer of the peritoneum, hepatocellular cancer, gastrointestinal cancer, pancreatic cancer, glioblastoma, cervical cancer, ovarian cancer, liver cancer, bladder cancer, hepatoma, breast cancer, colon cancer, colorectal cancer, endometrial or uterine carcinoma, salivary gland carcinoma, kidney cancer, renal cell carcinoma, hepatocellular carcinoma, hepatoblastomas, liver cancer, prostate cancer, vulval cancer, thyroid cancer, hepatic carcinoma, brain cancer, endometrial cancer, testis cancer, cholangiocarcinoma, gallbladder carcinoma, gastric cancer, melanoma, and various types of head and neck cancer (including squamous cell carcinoma of the head and neck).

[0774] In some embodiments, the CTNNB1-associated disorder is hepatocellular carcinoma.

[0775] In some embodiments, the RNAi agent is administered to a subject in an amount effective to inhibit CTNNB1 expression in a cell within the subject. The amount effective to inhibit CTNNB1 expression in a cell within a subject may be assessed using methods discussed above, including methods that involve assessment of the inhibition of CTNNB1 mRNA, CTNNB1 protein, or related variables, such as tumor formation.

[0776] An iRNA of the invention may be administered as a “free iRNA.” A free iRNA is administered in the absence of a pharmaceutical composition. The naked iRNA may be in a suitable buffer solution. The buffer solution may comprise acetate, citrate, prolamine, carbonate, or phosphate, or any combination thereof. In one embodiment, the buffer solution is phosphate buffered saline (PBS). The pH and osmolarity of the buffer solution containing the iRNA can be adjusted such that it is suitable for administering to a subject.

[0777] Alternatively, an iRNA of the invention may be administered as a pharmaceutical composition, such as a dsRNA liposomal formulation.

[0778] Subjects that would benefit from an inhibition of CTNNB1 gene expression are subjects susceptible to or diagnosed with a CTNNB1-associated disorder, such as cancer, e.g., hepatocellular carcinoma. In an embodiment, the method includes administering a composition featured herein such that expression of the target a CTNNB1 gene is decreased, such as for about 1, 2, 3, 4, 5, 6, 1-6, 1-3, or 3-6 months per dose. In certain embodiments, the composition is administered once every 3-6 months.

[0779] In one embodiment, the iRNAs useful for the methods and compositions featured herein specifically target RNAs (primary or processed) of the target CTNNB1 gene. Compositions and methods for inhibiting the expression of these genes using iRNAs can be prepared and performed as described herein.

[0780] Administration of the iRNA according to the methods of the invention may result prevention or treatment of a CTNNB1-associated disorder, e.g., cancer, e.g., hepatocellular carcinoma. Subjects can be administered a therapeutic amount of iRNA, such as about 0.01 mg/kg to about 200 mg/kg.

[0781] In one embodiment, the iRNA is administered subcutaneously, i.e., by subcutaneous injection. One or more injections may be used to deliver the desired dose of iRNA to a subject. The injections may be repeated over a period of time.

[0782] The administration may be repeated on a regular basis. In certain embodiments, after an initial treatment regimen, the treatments can be administered on a less frequent basis. A repeat-dose regimen may include administration of a therapeutic amount of iRNA on a regular basis, such as once per month to once a year. In certain embodiments, the iRNA is administered about once per month to about once every three months, or about once every three months to about once every six months.

[0783] The invention further provides methods and uses of an iRNA agent or a pharmaceutical composition thereof for treating a subject that would benefit from reduction and/or inhibition of CTNNB1 gene expression, e.g., a subject having a CTNNB1-associated disorder, in combination with other pharmaceuticals and/or other therapeutic methods, e.g., with known pharmaceuticals and/or known therapeutic methods, such as, for example, those which are currently employed for treating these disorders.

[0784] Accordingly, in some aspects of the invention, the methods which include administration of an iRNA agent of the invention, further include administering to the subject one or more additional therapeutic agents.

[0785] For example, in certain embodiments, an iRNA targeting CTNNB1 is administered in combination with, e.g., an agent useful in treating a CTNNB1-associated disorder. Exemplary additional therapeutics and treatments for treating a CTNNB1-associated disorder, e.g., cancer, may include surgery, chemotherapy, radiation therapy, or the administration of one or more additional anti-cancer agents, such as a chemotherapeutic agent, a growth inhibitory agent, an anti-angiogenesis agent and/or a anti-neoplastic composition. Nonlimiting examples of anti-cancer agents, chemotherapeutic agents, growth inhibitory agents, anti-angiogenesis agents, and anti-neoplastic compositions that can be used in combination with the iRNA of the present invention are as follows.

[0786] A “chemotherapeutic agent” is a chemical compound useful in the treatment of cancer. Examples of chemotherapeutic agents include, but are not limited to, alkylating agents such as thiotepa and Cytoxan® cyclosphosphamide; alkyl sulfonates such as busulfan, improsulfan and piposulfan; aziridines such as benzodopa, carboquone, meturedopa, and uredopa; ethylenimines and methylamelamines including altretamine, triethylenemelamine, trietylenephosphoramide, triethiylenethiophosphoramide and trimethylolomelamine; acetogenins (especially bullatacin and bullatacinone); a camptothecin (including the synthetic analogue topotecan); bryostatin; callystatin; CC-1065 (including its adozelesin, carzelesin and bizelesin synthetic analogues); cryptophycins (particularly cryptophycin 1 and cryptophycin 8); dolastatin; duocarmycin (including the synthetic analogues, KW-2189 and CB1-TM1); eleutherobin; pancratistatin; a sarcodictyin; spongistatin; nitrogen mustards such as chlorambucil, chlomaphazine, cholophosphamide, estramustine, ifosfamide, mechlorethamine, mechlorethamine oxide hydrochloride, melphalan, novembichin, phenesterine, prednimustine, trofosfamide, uracil mustard; nitrosureas such as carmustine, chlorozotocin, fotemustine, lomustine, nimustine, and ranimnustine; antibiotics such as the enediyne antibiotics (e.g., calicheamicin, especially calicheamicin gammalI and calicheamicin omegaIl (see, e.g., Agnew, Chem Intl. Ed. Engl., 33: 183-186 (1994)); dynemicin, including dynemicin A; bisphosphonates, such as clodronate; an esperamicin; as well as neocarzinostatin chromophore and related chromoprotein enediyne antiobiotic chromophores), aclacinomysins, actinomycin, authramycin, azaserine, bleomycins, cactinomycin, carabicin, carminomycin, carzinophilin, chromomycinis, dactinomycin, daunorubicin, detorubicin, 6-diazo-5-oxo-L-norleucine, Adriamycin® doxorubicin (including morpholino-doxorubicin, cyanomorpholino-doxorubicin, 2-pyrrolino-doxorubicin and deoxydoxorubicin), epirubicin, esorubicin, idarubicin, marcellomycin, mitomycins such as mitomycin C, mycophenolic acid, nogalamycin, olivomycins, peplomycin, potfiromycin, puromycin, quelamycin, rodorubicin, streptonigrin, streptozocin, tubercidin, ubenimex, zinostatin, zorubicin; anti-metabolites such as methotrexate and 5-fluorouracil (5-FU); folic acid analogues such as denopterin, methotrexate, pteropterin, trimetrexate; purine analogs such as fludarabine, 6-mercaptopurine, thiamiprine, thioguanine; pyrimidine analogs such as ancitabine, azacitidine, 6-azauridine, carmofur, cytarabine, dideoxyuridine, doxifluridine, enocitabine, floxuridine; androgens such as calusterone, dromostanolone propionate, epitiostanol, mepitiostane, testolactone; anti-adrenals such as aminoglutethimide, mitotane, trilostane; folic acid replenisher such as frolinic acid; aceglatone; aldophosphamide glycoside; aminolevulinic acid; eniluracil; amsacrine; bestrabucil; bisantrene; edatraxate; defofamine; demecolcine; diaziquone; elfornithine; elliptinium acetate; an epothilone; etoglucid; gallium nitrate; hydroxyurea; lentinan; lonidainine; maytansinoids such as maytansine and ansamitocins; mitoguazone; mitoxantrone; mopidanmol; nitraerine; pentostatin; phenamet; pirarubicin; losoxantrone; podophyllinic acid; 2-ethylhydrazide; procarbazine; PSK® polysaccharide complex (JHS Natural Products, Eugene, OR); razoxane; rhizoxin; sizofiran; spirogermanium; tenuazonic acid; triaziquone; 2,2′,2″-trichlorotriethylamine; trichothecenes (especially T-2 toxin, verracurin A, roridin A and anguidine); urethan; vindesine; dacarbazine; mannomustine; mitobronitol; mitolactol; pipobroman; gacytosine; arabinoside (“Ara-C”); cyclophosphamide; thiotepa; taxoids, e.g., Taxol® paclitaxel (Bristol-Myers Squibb Oncology, Princeton, N.J.), Abraxane® Cremophor-free, albumin-engineered nanoparticle formulation of paclitaxel (American Pharmaceutical Partners, Schaumberg, Illinois), and Taxotere® doxetaxel (Rh6ne-Poulenc Rorer, Antony, France); chloranbucil; Gemzar® gemcitabine; 6-thioguanine; mercaptopurine; methotrexate; platinum analogs such as cisplatin, oxaliplatin and carboplatin; vinblastine; platinum; etoposide (VP-16); ifosfamide; mitoxantrone; vincristine; Navelbine® vinorelbine; novantrone; teniposide; edatrexate; daunomycin; aminopterin; xeloda; ibandronate; irinotecan (Camptosar, CPT-11) (including the treatment regimen of irinotecan with 5-FU and leucovorin); topoisomerase inhibitor RFS 2000; difluorometlhylornithine (DMFO); retinoids such as retinoic acid; capecitabine; combretastatin; leucovorin (LV); oxaliplatin, including the oxaliplatin treatment regimen (FOLFOX); inhibitors of PKC-alpha, Raf, H-Ras, EGFR (e.g., erlotinib (Tarceva®)) and VEGF-A that reduce cell proliferation and pharmaceutically acceptable salts, acids or derivatives of any of the above.

[0787] Further nonlimiting exemplary chemotherapeutic agents include anti-hormonal agents that act to regulate or inhibit hormone action on cancers such as anti-estrogens and selective estrogen receptor modulators (SERMs), including, for example, tamoxifen (including Nolvadex® tamoxifen), raloxifene, droloxifene, 4-hydroxytamoxifen, trioxifene, keoxifene, LY117018, onapristone, and Fareston® toremifene; aromatase inhibitors that inhibit the enzyme aromatase, which regulates estrogen production in the adrenal glands, such as, for example, 4(5)-imidazoles, aminoglutethimide, Megase® megestrol acetate, Aromasin® exemestane, formestanie, fadrozole, Rivisor® vorozole, Femara® letrozole, and Arimidex® anastrozole; and anti-androgens such as flutamide, nilutamide, bicalutamide, leuprolide, and goserelin; as well as troxacitabine (a 1,3-dioxolane nucleoside cytosine analog); antisense oligonucleotides, particularly those which inhibit expression of genes in signaling pathways implicated in abherant cell proliferation, such as, for example, PKC-alpha, Ralf and H-Ras; ribozymes such as a VEGF expression inhibitor (e.g., Angiozyme® ribozyme) and a HER2 expression inhibitor; vaccines such as gene therapy vaccines, for example, Allovectin® vaccine, Leuvectin® vaccine, and Vaxid® vaccine; Proleukin® rIL-2; Lurtotecan® topoisomerase 1 inhibitor; Abarelix® rmRH; and pharmaceutically acceptable salts, acids or derivatives of any of the above.

[0788] In some embodiments, the iRNA of the invention may be further administered with gemcitabine-based chemotherapy in which one or more chemotherapy agents including gemcitabine or including gemcitabine and nab-paclitaxel are administered. In some such embodiments, the iRNA of the invention may be administered with at least one chemotherapy agent selected from gemcitabine, nab-paclitaxel, leukovorin (folinic acid), 5-fluorouracil (5-FU), irinotecan, and oxaliplatin. FOLFIRINOX is a chemotherapy regime comprising leukovorin, 5-FU, irinotecan (such as liposomal irinotecan injection), and oxaliplatin. In some embodiments, the iRNA of the invention may be further administered with gemcitabine-based chemotherapy. In some embodiments, the iRNA of the invention may be further administered with at least one agent selected from (a) gemcitabine; (b) gemcitabine and nab-paclitaxel; and (c) FOLFIRINOX. In some embodiments, the at least one agent is gemcitabine. In some such embodiments, the cancer to be treated is pancreatic cancer.

[0789] An “anti-angiogenesis agent” or “angiogenesis inhibitor” refers to a small molecular weight substance, a polynucleotide (including, e.g., an inhibitory RNA (RNAi or siRNA)), a polypeptide, an isolated protein, a recombinant protein, an antibody, or conjugates or fusion proteins thereof, that inhibits angiogenesis, vasculogenesis, or undesirable vascular permeability, either directly or indirectly. It should be understood that the anti-angiogenesis agent includes those agents that bind and block the angiogenic activity of the angiogenic factor or its receptor. For example, an anti-angiogenesis agent is an antibody or other antagonist to an angiogenic agent, e.g., antibodies to VEGF-A (e.g., bevacizumab (Avastin®)) or to the VEGF-A receptor (e.g., KDR receptor or Flt-1 receptor), anti-PDGFR inhibitors such as Gleevec® (Imatinib Mesylate), small molecules that block VEGF receptor signaling (e.g., PTK787/ZK2284, SU6668, Sutent®/SU11248 (sunitinib malate), AMG706, or those described in, e.g., international patent application WO 2004/113304). Anti-angiogensis agents also include native angiogenesis inhibitors, e.g., angiostatin, endostatin, etc. See, e.g., Klagsbrun and D′Amore (1991) Annu. Rev. Physiol. 53:217-39; Streit and Detmar (2003) Oncogene 22:3172-3179 (e.g., Table 3 listing anti-angiogenic therapy in malignant melanoma); Ferrara & Alitalo (1999) Nature Medicine 5(12):1359-1364; Tonini et al. (2003) Oncogene 22:6549-6556 (e.g., Table 2 listing known anti-angiogenic factors); and, Sato (2003) Int. J. Clin. Oncol. 8:200-206 (e.g., Table 1 listing anti-angiogenic agents used in clinical trials).

[0790] A “growth inhibitory agent” as used herein refers to a compound or composition that inhibits growth of a cell (such as a cell expressing VEGF) either in vitro or in vivo. Thus, the growth inhibitory agent may be one that significantly reduces the percentage of cells (such as a cell expressing VEGF) in S phase. Examples of growth inhibitory agents include, but are not limited to, agents that block cell cycle progression (at a place other than S phase), such as agents that induce G1 arrest and M-phase arrest. Classical M-phase blockers include the vincas (vincristine and vinblastine), taxanes, and topoisomerase II inhibitors such as doxorubicin, epirubicin, daunorubicin, etoposide, and bleomycin. Those agents that arrest G1 also spill over into S-phase arrest, for example, DNA alkylating agents such as tamoxifen, prednisone, dacarbazine, mechlorethamine, cisplatin, methotrexate, 5-fluorouracil, and ara-C. Further information can be found in Mendelsohn and Israel, eds., The Molecular Basis of Cancer, Chapter 1, entitled “Cell cycle regulation, oncogenes, and antineoplastic drugs” by Murakami et al. (W.B. Saunders, Philadelphia, 1995), e.g., p. 13. The taxanes (paclitaxel and docetaxel) are anticancer drugs both derived from the yew tree. Docetaxel (Taxotere®, Rhone-Poulenc Rorer), derived from the European yew, is a semisynthetic analogue of paclitaxel (Taxol®, Bristol-Myers Squibb). Paclitaxel and docetaxel promote the assembly of microtubules from tubulin dimers and stabilize microtubules by preventing depolymerization, which results in the inhibition of mitosis in cells.

[0791] The term “anti-neoplastic composition” refers to a composition useful in treating cancer comprising at least one active therapeutic agent. Examples of therapeutic agents include, but are not limited to, e.g., chemotherapeutic agents, growth inhibitory agents, cytotoxic agents, agents used in radiation therapy, anti-angiogenesis agents, cancer immunotherapeutic agents, apoptotic agents, anti-tubulin agents, and other-agents to treat cancer, such as anti-HER-2 antibodies, anti-CD20 antibodies, an epidermal growth factor receptor (EGFR) antagonist (e.g., a tyrosine kinase inhibitor), HER1/EGFR inhibitor (e.g., erlotinib (Tarceva®), platelet derived growth factor inhibitors (e.g., Gleevec® (Imatinib Mesylate)), a COX-2 inhibitor (e.g., celecoxib), interferons, cytokines, antagonists (e.g., neutralizing antibodies) that bind to one or more of the following targets ErbB2, ErbB3, ErbB4, PDGFR-beta, BlyS, APRIL, BCMA, or VEGF receptor(s), and other bioactive and organic chemical agents, etc. Combinations thereof are also included in the invention.

[0792] In some embodiments, the iRNA targeting CTNNB1 is administered in combination with, e.g., an agent useful in treating hepatocellular carcinoma (HCC), for example, but not limited to, sorafenib.

[0793] The iRNA and additional therapeutic agents may be administered at the same time and/or in the same combination, e.g., parenterally, or the additional therapeutic agent can be administered as part of a separate composition or at separate times and/or by another method known in the art or described herein.

[0794] The iRNA agent and an additional therapeutic agent and/or treatment may be administered at the same time and/or in the same combination, e.g., parenterally, or the additional therapeutic agent can be administered as part of a separate composition or at separate times and/or by another method known in the art or described herein.

### VIII. Kits

[0795] In certain aspects, the instant disclosure provides kits that include a suitable container containing a pharmaceutical formulation of a siRNA compound, e.g., a double-stranded siRNA compound, or siRNA compound, (e.g., a precursor, e.g., a larger siRNA compound which can be processed into a siRNA compound, or a DNA which encodes an siRNA compound, e.g., a double-stranded siRNA compound, or ssiRNA compound, or precursor thereof).

[0796] Such kits include one or more dsRNA agent(s) and instructions for use, e.g., instructions for administering a prophylactically or therapeutically effective amount of a dsRNA agent(s). The dsRNA agent may be in a vial or a pre-filled syringe. The kits may optionally further comprise means for administering the dsRNA agent (e.g., an injection device, such as a pre-filled syringe), or means for measuring the inhibition of CTNNB1 (e.g., means for measuring the inhibition of CTNNB1 mRNA, CTNNB1 protein, and/or CTNNB1 activity). Such means for measuring the inhibition of CTNNB1 may comprise a means for obtaining a sample from a subject, such as, e.g., a plasma sample. The kits of the invention may optionally further comprise means for determining the therapeutically effective or prophylactically effective amount.

[0797] In certain embodiments the individual components of the pharmaceutical formulation may be provided in one container, e.g., a vial or a pre-filled syringe. Alternatively, it may be desirable to provide the components of the pharmaceutical formulation separately in two or more containers, e.g., one container for a siRNA compound preparation, and at least another for a carrier compound. The kit may be packaged in a number of different configurations such as one or more containers in a single box. The different components can be combined, e.g., according to instructions provided with the kit.

[0798] The components can be combined according to a method described herein, e.g., to prepare and administer a pharmaceutical composition. The kit can also include a delivery device.

[0799] This invention is further illustrated by the following examples which should not be construed as limiting. The entire contents of all references, patents and published patent applications cited throughout this application, as well as the informal Sequence Listing and Figures, are hereby incorporated herein by reference.

### EXAMPLES

### Example 1. iRNA Synthesis

### Source of Reagents

[0800] Where the source of a reagent is not specifically given herein, such reagent can be obtained from any supplier of reagents for molecular biology at a quality/purity standard for application in molecular biology.

siRNA Design

[0801] siRNAs targeting the human beta-catenin (CTNNB1) gene (human: NCBI refseqID NM_001904.4, NCBI GeneID: 1499) were designed using custom R and Python scripts. The human NM_001904.4 REFSEQ mRNA, has a length of 3661 bases.

[0802] Detailed lists of the unmodified CTNNB1 sense and antisense strand nucleotide sequences are shown in Table 2. Detailed lists of the modified CTNNB1 sense and antisense strand nucleotide sequences are shown in Table 3.

[0803] It is to be understood that, throughout the application, a duplex name without a decimal is equivalent to a duplex name with a decimal which merely references the batch number of the duplex.

[0804] For example, AD-959917 is equivalent to AD-959917.1.

siRNA Synthesis

[0805] siRNAs were designed, synthesized, and prepared using methods known in the art.

[0806] Briefly, siRNA sequences were synthesized on a 1 μmol scale using a Mermade 192 synthesizer (BioAutomation) with phosphoramidite chemistry on solid supports. The solid support was controlled pore glass (500-1000 A) loaded with a custom GalNAc ligand (3′-GalNAc conjugates), universal solid support (AM Chemicals), or the first nucleotide of interest. Ancillary synthesis reagents and standard 2-cyanoethyl phosphoramidite monomers (2′-deoxy-2′-fluoro, 2′-O-methyl, RNA, DNA) were obtained from Thermo-Fisher (Milwaukee, WI), Hongene (China), or Chemgenes (Wilmington, MA, USA). Additional phosphoramidite monomers were procured from commercial suppliers, prepared in-house, or procured using custom synthesis from various CMOs. Phosphoramidites were prepared at a concentration of 100 mM in either acetonitrile or 9:1 acetonitrile:DMF and were coupled using 5-Ethylthio-1H-tetrazole (ETT, 0.25 M in acetonitrile) with a reaction time of 400 s. Phosphorothioate linkages were generated using a 100 mM solution of 3-((Dimethylamino-methylidene) amino)-3H-1,2,4-dithiazole-3-thione (DDTT, obtained from Chemgenes (Wilmington, MA, USA)) in anhydrous acetonitrile/pyridine (9:1 v/v). Oxidation time was 5 minutes. All sequences were synthesized with final removal of the DMT group (“DMT-Off”).

[0807] Upon completion of the solid phase synthesis, solid-supported oligoribonucleotides were treated with 300 μL of Methylamine (40% aqueous) at room temperature in 96 well plates for approximately 2 hours to afford cleavage from the solid support and subsequent removal of all additional base-labile protecting groups. For sequences containing any natural ribonucleotide linkages (2′-OH) protected with a tert-butyl dimethyl silyl (TBDMS) group, a second deprotection step was performed using TEA.3HF (triethylamine trihydrofluoride). To each oligonucleotide solution in aqueous methylamine was added 200 μL of dimethyl sulfoxide (DMSO) and 300 μL TEA.3HF and the solution was incubated for approximately 30 mins at 60° C. After incubation, the plate was allowed to come to room temperature and crude oligonucleotides were precipitated by the addition of 1 mL of 9:1 acetontrile:ethanol or 1:1 ethanol:isopropanol. The plates were then centrifuged at 4° C. for 45 mins and the supernatant carefully decanted with the aid of a multichannel pipette. The oligonucleotide pellet was resuspended in 20 mM NaOAc and subsequently desalted using a HiTrap size exclusion column (5 mL, GE Healthcare) on an Agilent LC system equipped with an autosampler, UV detector, conductivity meter, and fraction collector. Desalted samples were collected in 96 well plates and then analyzed by LC-MS and UV spectrometry to confirm identity and quantify the amount of material, respectively.

[0808] Duplexing of single strands was performed on a Tecan liquid handling robot. Sense and antisense single strands were combined in an equimolar ratio to a final concentration of 10 μM in 1×PBS in 96 well plates, the plate sealed, incubated at 100° C. for 10 minutes, and subsequently allowed to return slowly to room temperature over a period of 2-3 hours. The concentration and identity of each duplex was confirmed and then subsequently utilized for in vitro screening assays.

### Example 2. In Vitro Screening Methods

### Cell Culture and 384-Well Transfections

[0809] Hep3b cells (ATCC, Manassas, VA) were grown to near confluence at 37° C. in an atmosphere of 5% CO₂ in Eagle's Minimum Essential Medium (Gibco) supplemented with 10% FBS (ATCC) before being released from the plate by trypsinization. Transfection was carried out by adding 7.5 μl of Opti-MEM plus 0.1 μl of Lipofectamine RNAiMax per well (Invitrogen, Carlsbad CA. cat #13778-150) to 2.5 μl of each siRNA duplex to an individual well in a 384-well plate. The mixture was then incubated at room temperature for 15 minutes. Forty Il of complete growth media without antibiotic containing ˜1.5×10⁴ cells were then added to the siRNA mixture. Cells were incubated for 24 hours prior to RNA purification. Single dose experiments were performed at 10 nM, 1 nM, and 0.1 nM final duplex concentration.

Total RNA Isolation Using DYNABEADS mRNA Isolation Kit (Invitrogen™, Part #: 610-12)

[0810] Cells were lysed in 75 μl of Lysis/Binding Buffer containing 3 μL of beads per well and mixed for 10 minutes on an electrostatic shaker. The washing steps were automated on a Biotek EL406, using a magnetic plate support. Beads were washed (in 90 L) once in Buffer A, once in Buffer B, and twice in Buffer E, with aspiration steps in between. Following a final aspiration, complete 10 μL RT mixture was added to each well, as described below.

cDNA Synthesis Using ABI High Capacity cDNA Reverse Transcription Kit (Applied Biosystems, Foster City, CA, Cat #4368813)

[0811] A master mix of 1 μl 10× Buffer, 0.4 μl 25×dNTPs, 1 μl Random primers, 0.5 μl Reverse Transcriptase, 0.5 μl RNase inhibitor and 6.6 1 of H₂O per reaction were added per well. Plates were sealed, agitated for 10 minutes on an electrostatic shaker, and then incubated at 37 degrees C. for 2 hours. Following this, the plates were agitated at 80 degrees C. for 8 minutes.

### Real Time PCR

[0812] Two microlitre (μl) of cDNA were added to a master mix containing 0.5 μl of human GAPDH TaqMan Probe (4326317E), 0.5 μl human CTNNB1, 2p1 nuclease-free water and 5 μl Lightcycler 480 probe master mix (Roche Cat #04887301001) per well in a 384 well plates (Roche cat #04887301001). Real time PCR was done in a LightCycler480 Real Time PCR system (Roche).

[0813] To calculate relative fold change, data were analyzed using the ΔΔCt method and normalized to assays performed with cells transfected with 10 nM AD-1955, or mock transfected cells. IC₅₀s were calculated using a 4 parameter fit model using XLFit and normalized to cells transfected with AD-1955 or mock-transfected. The sense and antisense sequences of AD-1955 are: sense: cuuAcGcuGAGuAcuucGAdTsdT (SEQ ID NO: 22) and antisense UCGAAGuACUcAGCGuAAGdTsdT (SEQ ID NO: 23).

[0814] The results of a single dose screen of the agents in Tables 2 and 3 in Hep3b cells are shown in Table 4.

TABLE 1
Abbreviations of nucleotide monomers used in nucleic acid sequence representation. It will
be understood that these monomers, when present in an oligonucleotide, are mutually linked by 5′-3′-
phosphodiester bonds; and it is understood that when the nucleotide contains a 2′-fluoro modification,
then the fluoro replaces the hydroxy at that position in the parent nucleotide (i.e., it is a 2′-deoxy-2′-
fluoronucleotide).

| Abbreviation | Nucleotide(s) |
|---|---|
| A | Adenosine-3′-phosphate |
| Ab | beta-L-adenosine-3′-phosphate |
| Abs | beta-L-adenosine-3′-phosphorothioate |
| Af | 2′-fluoroadenosine-3′-phosphate |
| Afs | 2′-fluoroadenosine-3′-phosphorothioate |
| As | adenosine-3′-phosphorothioate |
| C | cytidine-3′-phosphate |
| Cb | beta-L-cytidine-3′-phosphate |
| Cbs | beta-L-cytidine-3′-phosphorothioate |
| Cf | 2′-fluorocytidine-3′-phosphate |
| Cfs | 2′-fluorocytidine-3′-phosphorothioate |
| Cs | cytidine-3′-phosphorothioate |
| G | guanosine-3′-phosphate |
| Gb | beta-L-guanosine-3′-phosphate |
| Gbs | beta-L-guanosine-3′-phosphorothioate |
| Gf | 2′-fluoroguanosine-3′-phosphate |
| Gfs | 2′-fluoroguanosine-3′-phosphorothioate |
| Gs | guanosine-3′-phosphorothioate |
| T | 5′-methyluridine-3′-phosphate |
| Tf | 2′-fluoro-5-methyluridine-3′-phosphate |
| Tfs | 2′-fluoro-5-methyluridine-3′-phosphorothioate |
| Ts | 5-methyluridine-3′-phosphorothioate |
| U | Uridine-3′-phosphate |
| Uf | 2′-fluorouridine-3′-phosphate |
| Ufs | 2′-fluorouridine-3′-phosphorothioate |
| Us | uridine-3′-phosphorothioate |
| N | any nucleotide, modified or unmodified |
| a | 2′-O-methyladenosine-3′-phosphate |
| as | 2′-O-methyladenosine-3′-phosphorothioate |
| c | 2′-O-methylcytidine-3′-phosphate |
| cs | 2′-O-methylcytidine-3′-phosphorothioate |
| g | 2′-O-methylguanosine-3′-phosphate |
| gs | 2′-O-methylguanosine-3′-phosphorothioate |
| t | 2′-O-methyl-5-methyluridine-3′-phosphate |
| ts | 2′-O-methyl-5-methyluridine-3′-phosphorothioate |
| u | 2′-O-methyluridine-3′-phosphate |
| us | 2′-O-methyluridine-3′-phosphorothioate |
| s | phosphorothioate linkage |
| L10 | N-(cholesterylcarboxamidocaproyl)-4-hydroxyprolinol (Hyp-C6-Chol) |
| L96 | N-[tris(GalNAc-alkyl)-amidodecanoyl)]-4-hydroxyprolinol |
| | (Hyp-(GalNAc-alkyl)3) |
| | [chemical structure] |
| Y34 | 2-hydroxymethyl-tetrahydrofurane-4-methoxy-3-phosphate (abasic 2′-OMe |
| | furanose) |
| Y44 | inverted abasic DNA (2-hydroxymethyl-tetrahydrofurane-5-phosphate) |
| (Agn) | Adenosine-glycol nucleic acid (GNA) |
| (Cgn) | Cytidine-glycol nucleic acid (GNA) |
| (Ggn) | Guanosine-glycol nucleic acid (GNA) |
| (Tgn) | Thymidine-glycol nucleic acid (GNA) S-Isomer |
| P | Phosphate |
| VP | Vinyl-phosphonate |
| dA | 2′-deoxyadenosine-3′-phosphate |
| dAs | 2′-deoxyadenosine-3′-phosphorothioate |
| dC | 2′-deoxycytidine-3′-phosphate |
| dCs | 2′-deoxycytidine-3′-phosphorothioate |
| dG | 2′-deoxyguanosine-3′-phosphate |
| dGs | 2′-deoxyguanosine-3′-phosphorothioate |
| dT | 2′-deoxythimidine-3′-phosphate |
| dTs | 2′-deoxythimidine-3′-phosphorothioate |
| dU | 2′-deoxyuridine |
| dUs | 2′-deoxyuridine-3′-phosphorothioate |
| (C2p) | cytidine-2′-phosphate |
| (G2p) | guanosine-2′-phosphate |
| (U2p) | uridine-2′-phosphate |
| (A2p) | adenosine-2′-phosphate |
| (Chd) | 2′-O-hexadecyl-cytidine-3′-phosphate |
| (Ahd) | 2′-O-hexadecyl-adenosine-3′-phosphate |
| (Ghd) | 2′-O-hexadecyl-guanosine-3′-phosphate |
| (Uhd) | 2′-O-hexadecyl-uridine-3′-phosphate |

TABLE 2
Unmodified Sense and Antisense Strand Sequences of CTNNB1 dsRNA Agents

| | | SEQ | | | SEQ | |
|---|---|---|---|---|---|---|
| | Sense Sequence | ID | Range in | Antisense Sequence | ID | Range in |
| Duplex Name | 5′ to 3′ | NO: | NM_001904.4 | 5′ to 3′ | NO: | NM_001904.4 |
| AD-1548365.1 | GAGGGUAUUUGAAGUAUACCA | 24 | 164-184 | UGGUAUACUUCAAAUACCCUCAG | 325 | 162-184 |
| AD-1548366.1 | GAGGGUAUUUGAAGUAUACCA | 24 | 164-184 | UGGUAUACUUCAAAUACCCUCAG | 325 | 162-184 |
| AD-1548367.1 | GGGUAUUUGAAGUAUACCAUA | 25 | 166-186 | UAUGGUAUACUUCAAAUACCCUC | 326 | 164-186 |
| AD-1548368.1 | GGUAUUUGAAGUAUACCAUAA | 26 | 167-187 | UUAUGGTAUACUUCAAAUACCCU | 327 | 165-187 |
| AD-1548369.1 | UUUGAAGUAUACCAUACAACA | 27 | 171-191 | UGUUGUAUGGUAUACUUCAAAUA | 328 | 169-191 |
| AD-1548370.1 | UUGAAGUAUACCAUACAACUA | 28 | 172-192 | UAGUTGTAUGGUAUACUUCAAAU | 329 | 170-192 |
| AD-1548371.1 | UGGACAAUGGCUACUCAAGCA | 29 | 209-229 | UGCUTGAGUAGCCAUUGUCCACG | 330 | 207-229 |
| AD-1548372.1 | GACAAUGGCUACUCAAGCUGA | 30 | 211-231 | UCAGCUTGAGUAGCCAUUGUCCA | 331 | 209-231 |
| AD-1548373.1 | ACAAUGGCUACUCAAGCUGAA | 31 | 212-232 | UUCAGCTUGAGUAGCCAUUGUCC | 332 | 210-232 |
| AD-1548374.1 | AAGCUGAUUUGAUGGAGUUGA | 32 | 225-245 | UCAACUCCAUCAAAUCAGCUUGA | 333 | 223-245 |
| AD-1548375.1 | AGCUGAUUUGAUGGAGUUGGA | 33 | 226-246 | UCCAACTCCAUCAAAUCAGCUUG | 334 | 224-246 |
| AD-1548376.1 | CCUUCUCUGAGUGGUAAAGGA | 34 | 344-364 | UCCUTUACCACTCAGAGAAGGAG | 335 | 342-364 |
| AD-1548377.1 | CAGUCCUUCACUCAAGAACAA | 35 | 428-448 | UUGUTCTUGAGUGAAGGACUGAG | 336 | 426-448 |
| AD-1548378.1 | CUUCACUCAAGAACAAGUAGA | 36 | 433-453 | UCUACUTGUUCTUGAGUGAAGGA | 337 | 431-453 |
| AD-1548379.1 | CACUCAAGAACAAGUAGCUGA | 37 | 436-456 | UCAGCUACUUGTUCUUGAGUGAA | 338 | 434-456 |
| AD-1548380.1 | GUAGCUGAUAUUGAUGGACAA | 38 | 449-469 | UUGUCCAUCAAUAUCAGCUACUU | 339 | 447-469 |
| AD-1548381.1 | AUUGAUGGACAGUAUGCAAUA | 39 | 458-478 | UAUUGCAUACUGUCCAUCAAUAU | 340 | 456-478 |
| AD-1548382.1 | AGUAUGCAAUGACUCGAGCUA | 40 | 468-488 | UAGCTCGAGUCAUUGCAUACUGU | 341 | 466-488 |
| AD-1548383.1 | GGUACGAGCUGCUAUGUUCCA | 41 | 493-513 | UGGAACAUAGCAGCUCGUACCCU | 342 | 491-513 |
| AD-1548384.1 | ACGAGCUGCUAUGUUCCCUGA | 42 | 496-516 | UCAGGGAACAUAGCAGCUCGUAC | 343 | 494-516 |
| AD-1548385.1 | UGUUCCCUGAGACAUUAGAUA | 43 | 507-527 | UAUCTAAUGUCTCAGGGAACAUA | 344 | 505-527 |
| AD-1548386.1 | UUCCCUGAGACAUUAGAUGAA | 44 | 509-529 | UUCATCTAAUGUCUCAGGGAACA | 345 | 507-529 |
| AD-1548387.1 | AGAUGAGGGCAUGCAGAUCCA | 45 | 523-543 | UGGATCTGCAUGCCCUCAUCUAA | 346 | 521-543 |
| AD-1548388.1 | CUGCUCAUCCCACUAAUGUCA | 46 | 561-581 | UGACAUTAGUGGGAUGAGCAGCA | 347 | 559-581 |
| AD-1548389.1 | ACCAUCACAGAUGCUGAAACA | 47 | 595-615 | UGUUTCAGCAUCUGUGAUGGUUC | 348 | 593-615 |
| AD-1548390.1 | CAUCACAGAUGCUGAAACAUA | 48 | 597-617 | UAUGTUTCAGCAUCUGUGAUGGU | 349 | 595-617 |
| AD-1548391.1 | CAUCACAGAUGCUGAAACAUA | 48 | 597-617 | UAUGTUTCAGCAUCUGUGAUGGU | 349 | 595-617 |
| AD-1548392.1 | AUGCUGAAACAUGCAGUUGUA | 49 | 605-625 | UACAACTGCAUGUUUCAGCAUCU | 350 | 603-625 |
| AD-1548393.1 | AUGCUGAAACAUGCAGUUGUA | 49 | 605-625 | UACAACTGCAUGUUUCAGCAUCU | 350 | 603-625 |
| AD-1548394.1 | ACAUGCAGUUGUAAACUUGAA | 50 | 613-633 | UUCAAGTUUACAACUGCAUGUUU | 351 | 611-633 |
| AD-1548395.1 | AUGCAGUUGUAAACUUGAUUA | 51 | 615-635 | UAAUCAAGUUUACAACUGCAUGU | 352 | 613-635 |
| AD-1548396.1 | AUGCAGUUGUAAACUUGAUUA | 51 | 615-635 | UAAUCAAGUUUACAACUGCAUGU | 352 | 613-635 |
| AD-1548397.1 | ACGUGCAAUCCCUGAACUGAA | 52 | 664-684 | UUCAGUTCAGGGAUUGCACGUGU | 353 | 662-684 |
| AD-1548398.1 | UGCAAUCCCUGAACUGACAAA | 53 | 667-687 | UUUGTCAGUUCAGGGAUUGCACG | 354 | 665-687 |
| AD-1548399.1 | GACCAGGUGGUGGUUAAUAAA | 54 | 704-724 | UUUATUAACCACCACCUGGUCCU | 355 | 702-724 |
| AD-1548400.1 | GACCAGGUGGUGGUUAAUAAA | 54 | 704-724 | UTUATUAACCACCACCUGGUCCU | 356 | 702-724 |
| AD-1548401.1 | CCAGGUGGUGGUUAAUAAGGA | 55 | 706-726 | UCCUTATUAACCACCACCUGGUC | 357 | 704-726 |
| AD-1548402.1 | GUUAAUAAGGCUGCAGUUAUA | 56 | 716-736 | UAUAACTGCAGCCUUAUUAACCA | 358 | 714-736 |
| AD-1548403.1 | CCUCAGAUGGUGUCUGCUAUA | 57 | 788-808 | UAUAGCAGACACCAUCUGAGGAG | 359 | 786-808 |
| AD-1548404.1 | UCAGAUGGUGUCUGCUAUUGA | 58 | 790-810 | UCAATAGCAGACACCAUCUGAGG | 360 | 788-810 |
| AD-1548405.1 | AGAUGGUGUCUGCUAUUGUAA | 59 | 792-812 | UUACAATAGCAGACACCAUCUGA | 361 | 790-812 |
| AD-1548406.1 | AGAUGGUGUCUGCUAUUGUAA | 59 | 792-812 | UTACAATAGCAGACACCAUCUGA | 362 | 790-812 |
| AD-1548407.1 | ACGUACCAUGCAGAAUACAAA | 60 | 811-831 | UUUGTATUCUGCAUGGUACGUAC | 363 | 809-831 |
| AD-1548408.1 | ACGUACCAUGCAGAAUACAAA | 60 | 811-831 | UTUGTATUCUGCAUGGUACGUAC | 364 | 809-831 |
| AD-1548409.1 | CGUACCAUGCAGAAUACAAAA | 61 | 812-832 | UUUUGUAUUCUGCAUGGUACGUA | 365 | 810-832 |
| AD-1548410.1 | GUACCAUGCAGAAUACAAAUA | 62 | 813-833 | UAUUTGTAUUCUGCAUGGUACGU | 366 | 811-833 |
| AD-1548411.1 | UACCAUGCAGAAUACAAAUGA | 63 | 814-834 | UCAUTUGUAUUCUGCAUGGUACG | 367 | 812-834 |
| AD-1548412.1 | ACCAUGCAGAAUACAAAUGAA | 64 | 815-835 | UTCATUTGUAUTCUGCAUGGUAC | 368 | 813-835 |
| AD-1548413.1 | CCAUGCAGAAUACAAAUGAUA | 65 | 816-836 | UAUCAUTUGUATUCUGCAUGGUA | 369 | 814-836 |
| AD-1548414.1 | CAUGCAGAAUACAAAUGAUGA | 66 | 817-837 | UCAUCATUUGUAUUCUGCAUGGU | 370 | 815-837 |
| AD-1548415.1 | AUGCAGAAUACAAAUGAUGUA | 67 | 818-838 | UACATCAUUUGUAUUCUGCAUGG | 371 | 816-838 |
| AD-1548416.1 | GCAGAAUACAAAUGAUGUAGA | 68 | 820-840 | UCUACATCAUUTGUAUUCUGCAU | 372 | 818-840 |
| AD-1548417.1 | CAGAAUACAAAUGAUGUAGAA | 69 | 821-841 | UUCUACAUCAUUUGUAUUCUGCA | 373 | 819-841 |
| AD-1548418.1 | UGAUGUAGAAACAGCUCGUUA | 70 | 832-852 | UAACGAGCUGUTUCUACAUCAUU | 374 | 830-852 |
| AD-1548419.1 | GAUGUAGAAACAGCUCGUUGA | 71 | 833-853 | UCAACGAGCUGTUUCUACAUCAU | 375 | 831-853 |
| AD-1548420.1 | ACUGGCCAUCUUUAAGUCUGA | 72 | 898-918 | UCAGACTUAAAGAUGGCCAGUAA | 376 | 896-918 |
| AD-1548421.1 | CUGGCCAUCUUUAAGUCUGGA | 73 | 899-919 | UCCAGACUUAAAGAUGGCCAGUA | 377 | 897-919 |
| AD-1548422.1 | UGGCCAUCUUUAAGUCUGGAA | 74 | 900-920 | UUCCAGACUUAAAGAUGGCCAGU | 378 | 898-920 |
| AD-1548423.1 | GGCCAUCUUUAAGUCUGGAGA | 75 | 901-921 | UCUCCAGACUUAAAGAUGGCCAG | 379 | 899-921 |
| AD-1548424.1 | GCCAUCUUUAAGUCUGGAGGA | 76 | 902-922 | UCCUCCAGACUTAAAGAUGGCCA | 380 | 900-922 |
| AD-1548425.1 | UGGUUCACCAGUGGAUUCUGA | 77 | 946-966 | UCAGAATCCACTGGUGAACCAAG | 381 | 944-966 |
| AD-1548426.1 | ACCAGUGGAUUCUGUGUUGUA | 78 | 952-972 | UACAACACAGAAUCCACUGGUGA | 382 | 950-972 |
| AD-1548427.1 | AUGGCAGUGCGUUUAGCUGGA | 79 | 1025-1045 | UCCAGCTAAACGCACUGCCAUUU | 383 | 1023-1045 |
| AD-1548428.1 | AUGGCAGUGCGUUUAGCUGGA | 79 | 1025-1045 | UCCAGCTAAACGCACUGCCAUUU | 383 | 1023-1045 |
| AD-1548429.1 | UUGCCUUGCUCAACAAAACAA | 80 | 1062-1082 | UUGUTUTGUUGAGCAAGGCAACC | 384 | 1060-1082 |
| AD-1548430.1 | UGCCUUGCUCAACAAAACAAA | 81 | 1063-1083 | UTUGTUTUGUUGAGCAAGGCAAC | 385 | 1061-1083 |
| AD-1548431.1 | UGCCUUGCUCAACAAAACAAA | 81 | 1063-1083 | UUUGTUTUGUUGAGCAAGGCAAC | 386 | 1061-1083 |
| AD-1548432.1 | GCCUUGCUCAACAAAACAAAA | 82 | 1064-1084 | UUUUGUTUUGUUGAGCAAGGCAA | 387 | 1062-1084 |
| AD-1548433.1 | UUAAAUUCUUGGCUAUUACGA | 83 | 1086-1106 | UCGUAATAGCCAAGAAUUUAACA | 388 | 1084-1106 |
| AD-1548434.1 | AUUCUUGGCUAUUACGACAGA | 84 | 1090-1110 | UCUGTCGUAAUAGCCAAGAAUUU | 389 | 1088-1110 |
| AD-1548435.1 | GGCUAUUACGACAGACUGCCA | 85 | 1096-1116 | UGGCAGTCUGUCGUAAUAGCCAA | 390 | 1094-1116 |
| AD-1548436.1 | UACGACAGACUGCCUUCAAAA | 86 | 1102-1122 | UUUUGAAGGCAGUCUGUCGUAAU | 391 | 1100-1122 |
| AD-1548437.1 | CUUUAGUAAAUAUAAUGAGGA | 87 | 1182-1202 | UCCUCATUAUATUUACUAAAGCU | 392 | 1180-1202 |
| AD-1548438.1 | UAUAAUGAGGACCUAUACUUA | 88 | 1192-1212 | UAAGTATAGGUCCUCAUUAUAUU | 393 | 1190-1212 |
| AD-1548439.1 | AGCUGGUGGAAUGCAAGCUUA | 89 | 1291-1311 | UAAGCUTGCAUUCCACCAGCUUC | 394 | 1289-1311 |
| AD-1548440.1 | CAGAUCCAAGUCAACGUCUUA | 90 | 1326-1346 | UAAGACGUUGACUUGGAUCUGUC | 395 | 1324-1346 |
| AD-1548441.1 | CCAAGUCAACGUCUUGUUCAA | 91 | 1331-1351 | UUGAACAAGACGUUGACUUGGAU | 396 | 1329-1351 |
| AD-1548442.1 | CCAAGUCAACGUCUUGUUCAA | 91 | 1331-1351 | UTGAACAAGACGUUGACUUGGAU | 397 | 1329-1351 |
| AD-1548443.1 | AGAACUGUCUUUGGACUCUCA | 92 | 1350-1370 | UGAGAGTCCAAAGACAGUUCUGA | 398 | 1348-1370 |
| AD-1548444.1 | CUUUCAGAUGCUGCAACUAAA | 93 | 1376-1396 | UUUAGUTGCAGCAUCUGAAAGAU | 399 | 1374-1396 |
| AD-1548445.1 | UCAGAUGCUGCAACUAAACAA | 94 | 1379-1399 | UUGUTUAGUUGCAGCAUCUGAAA | 400 | 1377-1399 |
| AD-1548446.1 | GAUGCUGCAACUAAACAGGAA | 95 | 1382-1402 | UUCCTGTUUAGUUGCAGCAUCUG | 401 | 1380-1402 |
| AD-1548447.1 | CUGCAACUAAACAGGAAGGGA | 96 | 1386-1406 | UCCCTUCCUGUTUAGUUGCAGCA | 402 | 1384-1406 |
| AD-1548448.1 | GAAGGGAUGGAAGGUCUCCUA | 97 | 1400-1420 | UAGGAGACCUUCCAUCCCUUCCU | 403 | 1398-1420 |
| AD-1548449.1 | CUUCUGGGUUCAGAUGAUAUA | 98 | 1436-1456 | UAUATCAUCUGAACCCAGAAGCU | 404 | 1434-1456 |
| AD-1548450.1 | CCUGUGCAGCUGGAAUUCUUA | 99 | 1467-1487 | UAAGAATUCCAGCUGCACAGGUG | 405 | 1465-1487 |
| AD-1548451.1 | UGUGCAGCUGGAAUUCUUUCA | 100 | 1469-1489 | UGAAAGAAUUCCAGCUGCACAGG | 406 | 1467-1489 |
| AD-1548452.1 | AAUUCUUUCUAACCUCACUUA | 101 | 1480-1500 | UAAGTGAGGUUAGAAAGAAUUCC | 407 | 1478-1500 |
| AD-1548453.1 | UUCUUUCUAACCUCACUUGCA | 102 | 1482-1502 | UGCAAGTGAGGTUAGAAAGAAUU | 408 | 1480-1502 |
| AD-1548454.1 | CUUUCUAACCUCACUUGCAAA | 103 | 1484-1504 | UUUGCAAGUGAGGUUAGAAAGAA | 409 | 1482-1504 |
| AD-1548455.1 | UUUCUAACCUCACUUGCAAUA | 104 | 1485-1505 | UAUUGCAAGUGAGGUUAGAAAGA | 410 | 1483-1505 |
| AD-1548456.1 | CUAACCUCACUUGCAAUAAUA | 105 | 1488-1508 | UAUUAUTGCAAGUGAGGUUAGAA | 411 | 1486-1508 |
| AD-1548457.1 | UAACCUCACUUGCAAUAAUUA | 106 | 1489-1509 | UAAUTATUGCAAGUGAGGUUAGA | 412 | 1487-1509 |
| AD-1548458.1 | AACCUCACUUGCAAUAAUUAA | 107 | 1490-1510 | UTAATUAUUGCAAGUGAGGUUAG | 413 | 1488-1510 |
| AD-1548459.1 | ACCUCACUUGCAAUAAUUAUA | 108 | 1491-1511 | UAUAAUTAUUGCAAGUGAGGUUA | 414 | 1489-1511 |
| AD-1548460.1 | CCUCACUUGCAAUAAUUAUAA | 109 | 1492-1512 | UTAUAATUAUUGCAAGUGAGGUU | 415 | 1490-1512 |
| AD-1548461.1 | CUCACUUGCAAUAAUUAUAAA | 110 | 1493-1513 | UUUATAAUUAUUGCAAGUGAGGU | 416 | 1491-1513 |
| AD-1548462.1 | CUCACUUGCAAUAAUUAUAAA | 110 | 1493-1513 | UTUATAAUUAUTGCAAGUGAGGU | 417 | 1491-1513 |
| AD-1548463.1 | UCACUUGCAAUAAUUAUAAGA | 111 | 1494-1514 | UCUUAUAAUUATUGCAAGUGAGG | 418 | 1492-1514 |
| AD-1548464.1 | CACUUGCAAUAAUUAUAAGAA | 112 | 1495-1515 | UTCUTATAAUUAUUGCAAGUGAG | 419 | 1493-1515 |
| AD-1548465.1 | CAAGUGGGUGGUAUAGAGGCA | 113 | 1532-1552 | UGCCTCTAUACCACCCACUUGGC | 420 | 1530-1552 |
| AD-1548466.1 | GCUCUUGUGCGUACUGUCCUA | 114 | 1550-1570 | UAGGACAGUACGCACAAGAGCCU | 421 | 1548-1570 |
| AD-1548467.1 | CCUGCCAUCUGUGCUCUUCGA | 115 | 1601-1621 | UCGAAGAGCACAGAUGGCAGGCU | 422 | 1599-1621 |
| AD-1548468.1 | CUGCCAUCUGUGCUCUUCGUA | 116 | 1602-1622 | UACGAAGAGCACAGAUGGCAGGC | 423 | 1600-1622 |
| AD-1548469.1 | UGCCAUCUGUGCUCUUCGUCA | 117 | 1603-1623 | UGACGAAGAGCACAGAUGGCAGG | 424 | 1601-1623 |
| AD-1548470.1 | GCCAUCUGUGCUCUUCGUCAA | 118 | 1604-1624 | UTGACGAAGAGCACAGAUGGCAG | 425 | 1602-1624 |
| AD-1548471.1 | CCAUCUGUGCUCUUCGUCAUA | 119 | 1605-1625 | UAUGACGAAGAGCACAGAUGGCA | 426 | 1603-1625 |
| AD-1548472.1 | AUCUGUGCUCUUCGUCAUCUA | 120 | 1607-1627 | UAGATGACGAAGAGCACAGAUGG | 427 | 1605-1627 |
| AD-1548473.1 | UCUGUGCUCUUCGUCAUCUGA | 121 | 1608-1628 | UCAGAUGACGAAGAGCACAGAUG | 428 | 1606-1628 |
| AD-1548474.1 | CUGUGCUCUUCGUCAUCUGAA | 122 | 1609-1629 | UUCAGATGACGAAGAGCACAGAU | 429 | 1607-1629 |
| AD-1548475.1 | UGUGCUCUUCGUCAUCUGACA | 123 | 1610-1630 | UGUCAGAUGACGAAGAGCACAGA | 430 | 1608-1630 |
| AD-1548476.1 | UGGACUACCAGUUGUGGUUAA | 124 | 1681-1701 | UUAACCACAACUGGUAGUCCAUA | 431 | 1679-1701 |
| AD-1548477.1 | GACUACCAGUUGUGGUUAAGA | 125 | 1683-1703 | UCUUAACCACAACUGGUAGUCCA | 432 | 1681-1703 |
| AD-1548478.1 | UGUGGUUAAGCUCUUACACCA | 126 | 1693-1713 | UGGUGUAAGAGCUUAACCACAAC | 433 | 1691-1713 |
| AD-1548479.1 | GAUAAAGGCUACUGUUGGAUA | 127 | 1732-1752 | UAUCCAACAGUAGCCUUUAUCAG | 434 | 1730-1752 |
| AD-1548480.1 | AUAAAGGCUACUGUUGGAUUA | 128 | 1733-1753 | UAAUCCAACAGUAGCCUUUAUCA | 435 | 1731-1753 |
| AD-1548481.1 | AUAAAGGCUACUGUUGGAUUA | 128 | 1733-1753 | UAAUCCAACAGTAGCCUUUAUCA | 436 | 1731-1753 |
| AD-1548482.1 | AAGGCUACUGUUGGAUUGAUA | 129 | 1736-1756 | UAUCAATCCAACAGUAGCCUUUA | 437 | 1734-1756 |
| AD-1548483.1 | AAGGCUACUGUUGGAUUGAUA | 129 | 1736-1756 | UAUCAATCCAACAGUAGCCUUUA | 437 | 1734-1756 |
| AD-1548484.1 | AGGCUACUGUUGGAUUGAUUA | 130 | 1737-1757 | UAAUCAAUCCAACAGUAGCCUUU | 438 | 1735-1757 |
| AD-1548485.1 | GGCUACUGUUGGAUUGAUUCA | 131 | 1738-1758 | UGAATCAAUCCAACAGUAGCCUU | 439 | 1736-1758 |
| AD-1548486.1 | GCUACUGUUGGAUUGAUUCGA | 132 | 1739-1759 | UCGAAUCAAUCCAACAGUAGCCU | 440 | 1737-1759 |
| AD-1548487.1 | CUACUGUUGGAUUGAUUCGAA | 133 | 1740-1760 | UTCGAATCAAUCCAACAGUAGCC | 441 | 1738-1760 |
| AD-1548488.1 | UACUGUUGGAUUGAUUCGAAA | 19 | 1741-1761 | UTUCGAAUCAATCCAACAGUAGC | 18 | 1739-1761 |
| AD-1548489.1 | ACUGUUGGAUUGAUUCGAAAA | 134 | 1742-1762 | UTUUCGAAUCAAUCCAACAGUAG | 442 | 1740-1762 |
| AD-1548490.1 | CUGUUGGAUUGAUUCGAAAUA | 135 | 1743-1763 | UAUUTCGAAUCAAUCCAACAGUA | 443 | 1741-1763 |
| AD-1548491.1 | GUUGGAUUGAUUCGAAAUCUA | 136 | 1745-1765 | UAGATUTCGAATCAAUCCAACAG | 444 | 1743-1765 |
| AD-1548492.1 | GUUGGAUUGAUUCGAAAUCUA | 136 | 1745-1765 | UAGATUTCGAAUCAAUCCAACAG | 445 | 1743-1765 |
| AD-1548493.1 | UUGGAUUGAUUCGAAAUCUUA | 137 | 1746-1766 | UAAGAUTUCGAAUCAAUCCAACA | 446 | 1744-1766 |
| AD-1548494.1 | GGAUUGAUUCGAAAUCUUGCA | 138 | 1748-1768 | UGCAAGAUUUCGAAUCAAUCCAA | 447 | 1746-1768 |
| AD-1548495.1 | GGAUUGAUUCGAAAUCUUGCA | 138 | 1748-1768 | UGCAAGAUUUCGAAUCAAUCCAA | 447 | 1746-1768 |
| AD-1548496.1 | UUGAUUCGAAAUCUUGCCCUA | 139 | 1751-1771 | UAGGGCAAGAUUUCGAAUCAAUC | 448 | 1749-1771 |
| AD-1548497.1 | AUUCCACGACUAGUUCAGUUA | 140 | 1811-1831 | UAACTGAACUAGUCGUGGAAUGG | 449 | 1809-1831 |
| AD-1548498.1 | CCACGACUAGUUCAGUUGCUA | 141 | 1814-1834 | UAGCAACUGAACUAGUCGUGGAA | 450 | 1812-1834 |
| AD-1548499.1 | UUCAGUUGCUUGUUCGUGCAA | 142 | 1824-1844 | UTGCACGAACAAGCAACUGAACU | 451 | 1822-1844 |
| AD-1548500.1 | GGACACAGCAGCAAUUUGUGA | 143 | 1878-1898 | UCACAAAUUGCTGCUGUGUCCCA | 452 | 1876-1898 |
| AD-1548501.1 | AUCCUAGCUCGGGAUGUUCAA | 144 | 1949-1969 | UUGAACAUCCCGAGCUAGGAUGU | 453 | 1947-1969 |
| AD-1548502.1 | AGCUCGGGAUGUUCACAACCA | 145 | 1954-1974 | UGGUTGTGAACAUCCCGAGCUAG | 454 | 1952-1974 |
| AD-1548503.1 | GAUGUUCACAACCGAAUUGUA | 146 | 1961-1981 | UACAAUTCGGUTGUGAACAUCCC | 455 | 1959-1981 |
| AD-1548504.1 | UAUCAGAGGACUAAAUACCAA | 147 | 1981-2001 | UUGGTATUUAGUCCUCUGAUAAC | 456 | 1979-2001 |
| AD-1548505.1 | AUCAGAGGACUAAAUACCAUA | 148 | 1982-2002 | UAUGGUAUUUAGUCCUCUGAUAA | 457 | 1980-2002 |
| AD-1548506.1 | UCAGAGGACUAAAUACCAUUA | 149 | 1983-2003 | UAAUGGTAUUUAGUCCUCUGAUA | 458 | 1981-2003 |
| AD-1548507.1 | GAGGACUAAAUACCAUUCCAA | 150 | 1986-2006 | UUGGAATGGUAUUUAGUCCUCUG | 459 | 1984-2006 |
| AD-1548508.1 | GAGGACUAAAUACCAUUCCAA | 150 | 1986-2006 | UTGGAATGGUATUUAGUCCUCUG | 460 | 1984-2006 |
| AD-1548509.1 | GGACUAAAUACCAUUCCAUUA | 151 | 1988-2008 | UAAUGGAAUGGTAUUUAGUCCUC | 461 | 1986-2008 |
| AD-1548510.1 | ACUAAAUACCAUUCCAUUGUA | 152 | 1990-2010 | UACAAUGGAAUGGUAUUUAGUCC | 462 | 1988-2010 |
| AD-1548511.1 | CUAAAUACCAUUCCAUUGUUA | 153 | 1991-2011 | UAACAATGGAATGGUAUUUAGUC | 463 | 1989-2011 |
| AD-1548512.1 | UAAAUACCAUUCCAUUGUUUA | 154 | 1992-2012 | UAAACAAUGGAAUGGUAUUUAGU | 464 | 1990-2012 |
| AD-1548513.1 | AAAUACCAUUCCAUUGUUUGA | 155 | 1993-2013 | UCAAACAAUGGAAUGGUAUUUAG | 465 | 1991-2013 |
| AD-1548514.1 | AAUACCAUUCCAUUGUUUGUA | 156 | 1994-2014 | UACAAACAAUGGAAUGGUAUUUA | 466 | 1992-2014 |
| AD-1548515.1 | AUACCAUUCCAUUGUUUGUGA | 157 | 1995-2015 | UCACAAACAAUGGAAUGGUAUUU | 467 | 1993-2015 |
| AD-1548515.2 | AUACCAUUCCAUUGUUUGUGA | 157 | 1995-2015 | UCACAAACAAUGGAAUGGUAUUU | 467 | 1993-2015 |
| AD-1548516.1 | UACCAUUCCAUUGUUUGUGCA | 158 | 1996-2016 | UGCACAAACAATGGAAUGGUAUU | 468 | 1994-2016 |
| AD-1548517.1 | ACCAUUCCAUUGUUUGUGCAA | 159 | 1997-2017 | UTGCACAAACAAUGGAAUGGUAU | 469 | 1995-2017 |
| AD-1548518.1 | ACCAUUCCAUUGUUUGUGCAA | 159 | 1997-2017 | UUGCACAAACAAUGGAAUGGUAU | 470 | 1995-2017 |
| AD-1548519.1 | CCAUUCCAUUGUUUGUGCAGA | 160 | 1998-2018 | UCUGCACAAACAAUGGAAUGGUA | 471 | 1996-2018 |
| AD-1548520.1 | CAUUCCAUUGUUUGUGCAGCA | 161 | 1999-2019 | UGCUGCACAAACAAUGGAAUGGU | 472 | 1997-2019 |
| AD-1548521.1 | UCCAUUGUUUGUGCAGCUGCA | 162 | 2002-2022 | UGCAGCTGCACAAACAAUGGAAU | 473 | 2000-2022 |
| AD-1548522.1 | GUUUGUGCAGCUGCUUUAUUA | 163 | 2008-2028 | UAAUAAAGCAGCUGCACAAACAA | 474 | 2006-2028 |
| AD-1548523.1 | CUCCUCUGACAGAGUUACUUA | 164 | 2127-2147 | UAAGTAACUCUGUCAGAGGAGCU | 475 | 2125-2147 |
| AD-1548524.1 | GACAGAGUUACUUCACUCUAA | 165 | 2134-2154 | UUAGAGTGAAGUAACUCUGUCAG | 476 | 2132-2154 |
| AD-1548525.1 | AGUUACUUCACUCUAGGAAUA | 166 | 2139-2159 | UAUUCCTAGAGUGAAGUAACUCU | 477 | 2137-2159 |
| AD-1548526.1 | GAGGACAAGCCACAAGAUUAA | 167 | 2204-2224 | UUAATCTUGUGGCUUGUCCUCAG | 478 | 2202-2224 |
| AD-1548527.1 | CACAAGAUUACAAGAAACGGA | 168 | 2214-2234 | UCCGTUTCUUGTAAUCUUGUGGC | 479 | 2212-2234 |
| AD-1548528.1 | ACAAGAUUACAAGAAACGGCA | 169 | 2215-2235 | UGCCGUTUCUUGUAAUCUUGUGG | 480 | 2213-2235 |
| AD-1548529.1 | CAAGAUUACAAGAAACGGCUA | 170 | 2216-2236 | UAGCCGTUUCUTGUAAUCUUGUG | 481 | 2214-2236 |
| AD-1548530.1 | AAGAUUACAAGAAACGGCUUA | 171 | 2217-2237 | UAAGCCGUUUCTUGUAAUCUUGU | 482 | 2215-2237 |
| AD-1548531.1 | UUACAAGAAACGGCUUUCAGA | 172 | 2221-2241 | UCUGAAAGCCGTUUCUUGUAAUC | 483 | 2219-2241 |
| AD-1548532.1 | UACAAGAAACGGCUUUCAGUA | 173 | 2222-2242 | UACUGAAAGCCGUUUCUUGUAAU | 484 | 2220-2242 |
| AD-1548533.1 | AAACGGCUUUCAGUUGAGCUA | 174 | 2228-2248 | UAGCTCAACUGAAAGCCGUUUCU | 485 | 2226-2248 |
| AD-1548534.1 | GCUUUCAGUUGAGCUGACCAA | 175 | 2233-2253 | UUGGTCAGCUCAACUGAAAGCCG | 486 | 2231-2253 |
| AD-1548535.1 | CUUGGACUUGAUAUUGGUGCA | 176 | 2300-2320 | UGCACCAAUAUCAAGUCCAAGAU | 487 | 2298-2320 |
| AD-1548536.1 | UAUCGCCAGGAUGAUCCUAGA | 177 | 2339-2359 | UCUAGGAUCAUCCUGGCGAUAUC | 488 | 2337-2359 |
| AD-1548537.1 | CACCACCCUGGUGCUGACUAA | 178 | 2438-2458 | UUAGTCAGCACCAGGGUGGUGGC | 489 | 2436-2458 |
| AD-1548538.1 | AUCAGCUGGCCUGGUUUGAUA | 179 | 2529-2549 | UAUCAAACCAGGCCAGCUGAUUG | 490 | 2527-2549 |
| AD-1548539.1 | UCAGCUGGCCUGGUUUGAUAA | 180 | 2530-2550 | UUAUCAAACCAGGCCAGCUGAUU | 491 | 2528-2550 |
| AD-1548540.1 | UCAGCUGGCCUGGUUUGAUAA | 180 | 2530-2550 | UTAUCAAACCAGGCCAGCUGAUU | 492 | 2528-2550 |
| AD-1548541.1 | CUGGCCUGGUUUGAUACUGAA | 181 | 2534-2554 | UUCAGUAUCAAACCAGGCCAGCU | 493 | 2532-2554 |
| AD-1548542.1 | CUGUAAAUCAUCCUUUAGGUA | 182 | 2555-2575 | UACCTAAAGGATGAUUUACAGGU | 494 | 2553-2575 |
| AD-1548543.1 | UGUAAAUCAUCCUUUAGGUAA | 183 | 2556-2576 | UTACCUAAAGGAUGAUUUACAGG | 495 | 2554-2576 |
| AD-1548544.1 | AAAGACUUGGUUGGUAGGGUA | 184 | 2634-2654 | UACCCUACCAACCAAGUCUUUCU | 496 | 2632-2654 |
| AD-1548545.1 | ACUUUGAAAGGAGAUGUCUUA | 185 | 2701-2721 | UAAGACAUCUCCUUUCAAAGUAU | 497 | 2699-2721 |
| AD-1548546.1 | ACUUUGAAAGGAGAUGUCUUA | 185 | 2701-2721 | UAAGACAUCUCCUUUCAAAGUAU | 497 | 2699-2721 |
| AD-1548547.1 | UUCUCAGAUUUCUGGUUGUUA | 186 | 2735-2755 | UAACAACCAGAAAUCUGAGAACA | 498 | 2733-2755 |
| AD-1548548.1 | UCUCAGAUUUCUGGUUGUUAA | 187 | 2736-2756 | UUAACAACCAGAAAUCUGAGAAC | 499 | 2734-2756 |
| AD-1548549.1 | UCUCAGAUUUCUGGUUGUUAA | 187 | 2736-2756 | UTAACAACCAGAAAUCUGAGAAC | 500 | 2734-2756 |
| AD-1548550.1 | CUCAGAUUUCUGGUUGUUAUA | 188 | 2737-2757 | UAUAACAACCAGAAAUCUGAGAA | 501 | 2735-2757 |
| AD-1548551.1 | GUUGUUAUGUGAUCAUGUGUA | 189 | 2749-2769 | UACACATGAUCACAUAACAACCA | 502 | 2747-2769 |
| AD-1548552.1 | UUGUUAUGUGAUCAUGUGUGA | 190 | 2750-2770 | UCACACAUGAUCACAUAACAACC | 503 | 2748-2770 |
| AD-1548553.1 | GUGAUCAUGUGUGGAAGUUAA | 191 | 2757-2777 | UUAACUTCCACACAUGAUCACAU | 504 | 2755-2777 |
| AD-1548554.1 | GAUCAUGUGUGGAAGUUAUUA | 192 | 2759-2779 | UAAUAACUUCCACACAUGAUCAC | 505 | 2757-2779 |
| AD-1548555.1 | AUCAUGUGUGGAAGUUAUUAA | 193 | 2760-2780 | UTAATAACUUCCACACAUGAUCA | 506 | 2758-2780 |
| AD-1548556.1 | UGCAACUUAAUACUCAAAUGA | 194 | 2806-2826 | UCAUTUGAGUATUAAGUUGCAAA | 507 | 2804-2826 |
| AD-1548557.1 | CCUUUCUCUCUUUAUACAGCA | 195 | 2859-2879 | UGCUGUAUAAAGAGAGAAAGGCU | 508 | 2857-2879 |
| AD-1548558.1 | UUUAUACAGCUGUAUUGUCUA | 196 | 2869-2889 | UAGACAAUACAGCUGUAUAAAGA | 509 | 2867-2889 |
| AD-1548559.1 | UUUAUACAGCUGUAUUGUCUA | 196 | 2869-2889 | UAGACAAUACAGCUGUAUAAAGA | 509 | 2867-2889 |
| AD-1548560.1 | AUUGUCUGAACUUGCAUUGUA | 197 | 2882-2902 | UACAAUGCAAGTUCAGACAAUAC | 510 | 2880-2902 |
| AD-1548561.1 | UUGGCCUGUAGAGUUGCUGAA | 198 | 2904-2924 | UUCAGCAACUCUACAGGCCAAUC | 511 | 2902-2924 |
| AD-1548562.1 | AGUGCCUGACACACUAACCAA | 199 | 2956-2976 | UUGGTUAGUGUGUCAGGCACUUU | 512 | 2954-2976 |
| AD-1548563.1 | CUGACACACUAACCAAGCUGA | 200 | 2961-2981 | UCAGCUTGGUUAGUGUGUCAGGC | 513 | 2959-2981 |
| AD-1548564.1 | UAACCAAGCUGAGUUUCCUAA | 201 | 2970-2990 | UTAGGAAACUCAGCUUGGUUAGU | 514 | 2968-2990 |
| AD-1548565.1 | AGCUGAGUUUCCUAUGGGAAA | 202 | 2976-2996 | UUUCCCAUAGGAAACUCAGCUUG | 515 | 2974-2996 |
| AD-1548566.1 | UUUCCUAUGGGAACAAUUGAA | 203 | 2983-3003 | UTCAAUTGUUCCCAUAGGAAACU | 516 | 2981-3003 |
| AD-1548567.1 | GUCGAGGAGUAACAAUACAAA | 204 | 3031-3051 | UUUGTATUGUUACUCCUCGACCA | 517 | 3029-3051 |
| AD-1548568.1 | GUCGAGGAGUAACAAUACAAA | 204 | 3031-3051 | UTUGTATUGUUACUCCUCGACCA | 518 | 3029-3051 |
| AD-1548569.1 | AUCAAACCCUAGCCUUGCUUA | 205 | 3114-3134 | UAAGCAAGGCUAGGGUUUGAUAA | 519 | 3112-3134 |
| AD-1548570.1 | UUUGCUUGCUUUGAAGUAGCA | 206 | 3183-3203 | UGCUACTUCAAAGCAAGCAAAGU | 520 | 3181-3203 |
| AD-1548571.1 | UGCUUGCUUUGAAGUAGCUCA | 207 | 3185-3205 | UGAGCUACUUCAAAGCAAGCAAA | 521 | 3183-3205 |
| AD-1548572.1 | GCUUGCUUUGAAGUAGCUCUA | 208 | 3186-3206 | UAGAGCTACUUCAAAGCAAGCAA | 522 | 3184-3206 |
| AD-1548573.1 | AAGUCUCUCGUAGUGUUAAGA | 209 | 3246-3266 | UCUUAACACUACGAGAGACUUAA | 523 | 3244-3266 |
| AD-1548574.1 | UCUCUCGUAGUGUUAAGUUAA | 210 | 3249-3269 | UUAACUTAACACUACGAGAGACU | 524 | 3247-3269 |
| AD-1548575.1 | CUCUCGUAGUGUUAAGUUAUA | 211 | 3250-3270 | UAUAACTUAACACUACGAGAGAC | 525 | 3248-3270 |
| AD-1548576.1 | CUCUCGUAGUGUUAAGUUAUA | 211 | 3250-3270 | UAUAACTUAACACUACGAGAGAC | 525 | 3248-3270 |
| AD-1548577.1 | CUCGUAGUGUUAAGUUAUAGA | 212 | 3252-3272 | UCUATAACUUAACACUACGAGAG | 526 | 3250-3272 |
| AD-1548578.1 | CGUAGUGUUAAGUUAUAGUGA | 213 | 3254-3274 | UCACTATAACUTAACACUACGAG | 527 | 3252-3274 |
| AD-1548579.1 | UAGUGUUAAGUUAUAGUGAAA | 214 | 3256-3276 | UUUCACTAUAACUUAACACUACG | 528 | 3254-3276 |
| AD-1548580.1 | GUGAAUACUGCUACAGCAAUA | 215 | 3271-3291 | UAUUGCTGUAGCAGUAUUCACUA | 529 | 3269-3291 |
| AD-1548581.1 | CUGCUACAGCAAUUUCUAAUA | 216 | 3278-3298 | UAUUAGAAAUUGCUGUAGCAGUA | 530 | 3276-3298 |
| AD-1548582.1 | GAAUUGAGUAAUGGUGUAGAA | 217 | 3304-3324 | UUCUACACCAUUACUCAAUUCUU | 531 | 3302-3324 |
| AD-1548583.1 | UUGAGUAAUGGUGUAGAACAA | 218 | 3307-3327 | UUGUTCTACACCAUUACUCAAUU | 532 | 3305-3327 |
| AD-1548584.1 | GAGUAAUGGUGUAGAACACUA | 219 | 3309-3329 | UAGUGUTCUACACCAUUACUCAA | 533 | 3307-3329 |
| AD-1548585.1 | AGUAAUGGUGUAGAACACUAA | 220 | 3310-3330 | UUAGTGTUCUACACCAUUACUCA | 534 | 3308-3330 |
| AD-1548586.1 | UAAUGGUGUAGAACACUAAUA | 221 | 3312-3332 | UAUUAGTGUUCUACACCAUUACU | 535 | 3310-3332 |
| AD-1548587.1 | AUGGUGUAGAACACUAAUUCA | 222 | 3314-3334 | UGAATUAGUGUTCUACACCAUUA | 536 | 3312-3334 |
| AD-1548588.1 | UGGUGUAGAACACUAAUUCAA | 223 | 3315-3335 | UTGAAUTAGUGTUCUACACCAUU | 537 | 3313-3335 |
| AD-1548589.1 | GGUGUAGAACACUAAUUCAUA | 224 | 3316-3336 | UAUGAATUAGUGUUCUACACCAU | 538 | 3314-3336 |
| AD-1548590.1 | GUGUAGAACACUAAUUCAUAA | 225 | 3317-3337 | UUAUGAAUUAGUGUUCUACACCA | 539 | 3315-3337 |
| AD-1548591.1 | UGUAGAACACUAAUUCAUAAA | 226 | 3318-3338 | UUUATGAAUUAGUGUUCUACACC | 540 | 3316-3338 |
| AD-1548592.1 | GUAGAACACUAAUUCAUAAUA | 227 | 3319-3339 | UAUUAUGAAUUAGUGUUCUACAC | 541 | 3317-3339 |
| AD-1548593.1 | UAGAACACUAAUUCAUAAUCA | 228 | 3320-3340 | UGAUTATGAAUTAGUGUUCUACA | 542 | 3318-3340 |
| AD-1548594.1 | AGAACACUAAUUCAUAAUCAA | 229 | 3321-3341 | UTGATUAUGAATUAGUGUUCUAC | 543 | 3319-3341 |
| AD-1548595.1 | AGAACACUAAUUCAUAAUCAA | 229 | 3321-3341 | UUGATUAUGAAUUAGUGUUCUAC | 544 | 3319-3341 |
| AD-1548596.1 | GAACACUAAUUCAUAAUCACA | 230 | 3322-3342 | UGUGAUTAUGAAUUAGUGUUCUA | 545 | 3320-3342 |
| AD-1548597.1 | AACACUAAUUCAUAAUCACUA | 231 | 3323-3343 | UAGUGATUAUGAAUUAGUGUUCU | 546 | 3321-3343 |
| AD-1548598.1 | AUGGUCCAAUUAGUUUCCUUA | 232 | 3413-3433 | UAAGGAAACUAAUUGGACCAUUU | 547 | 3411-3433 |
| AD-1548599.1 | UUUGGGAUAUGUAUGGGUAGA | 233 | 3489-3509 | UCUACCCAUACAUAUCCCAAAUA | 548 | 3487-3509 |
| AD-1548600.1 | UGUAUGGGUAGGGUAAAUCAA | 234 | 3498-3518 | UUGATUTACCCUACCCAUACAUA | 549 | 3496-3518 |
| AD-1548601.1 | AUGGGUAGGGUAAAUCAGUAA | 235 | 3501-3521 | UUACTGAUUUACCCUACCCAUAC | 550 | 3499-3521 |
| AD-1548602.1 | GUAGGGUAAAUCAGUAAGAGA | 236 | 3505-3525 | UCUCTUACUGATUUACCCUACCC | 551 | 3503-3525 |
| AD-1548603.1 | AGGGUAAAUCAGUAAGAGGUA | 237 | 3507-3527 | UACCTCTUACUGAUUUACCCUAC | 552 | 3505-3527 |
| AD-1548604.1 | GGGUAAAUCAGUAAGAGGUGA | 238 | 3508-3528 | UCACCUCUUACTGAUUUACCCUA | 553 | 3506-3528 |
| AD-1548605.1 | GUAAAUCAGUAAGAGGUGUUA | 239 | 3510-3530 | UAACACCUCUUACUGAUUUACCC | 554 | 3508-3530 |
| AD-1548606.1 | AAAUCAGUAAGAGGUGUUAUA | 240 | 3512-3532 | UAUAACACCUCUUACUGAUUUAC | 555 | 3510-3532 |
| AD-1548607.1 | AAUCAGUAAGAGGUGUUAUUA | 241 | 3513-3533 | UAAUAACACCUCUUACUGAUUUA | 556 | 3511-3533 |
| AD-1548608.1 | CAGUAAGAGGUGUUAUUUGGA | 242 | 3516-3536 | UCCAAATAACACCUCUUACUGAU | 557 | 3514-3536 |
| AD-1548609.1 | UUGGACAUGGCCAUGGAACCA | 243 | 242-262 | UGGUTCCAUGGCCAUGUCCAACU | 558 | 240-262 |
| AD-1548610.1 | UGGACUCUGGAAUCCAUUCUA | 244 | 306-326 | UAGAAUGGAUUCCAGAGUCCAGG | 559 | 304-326 |
| AD-1548611.1 | CUCUGAGUGGUAAAGGCAAUA | 245 | 348-368 | UAUUGCCUUUACCACUCAGAGAA | 560 | 346-368 |
| AD-1548612.1 | UCAAGAACAAGUAGCUGAUAA | 246 | 439-459 | UUAUCAGCUACUUGUUCUUGAGU | 561 | 437-459 |
| AD-1548613.1 | UAGCUGAUAUUGAUGGACAGA | 247 | 450-470 | UCUGTCCAUCAAUAUCAGCUACU | 562 | 448-470 |
| AD-1548614.1 | AGCUGAUAUUGAUGGACAGUA | 248 | 451-471 | UACUGUCCAUCAAUAUCAGCUAC | 563 | 449-471 |
| AD-1548615.1 | CUGAUAUUGAUGGACAGUAUA | 249 | 453-473 | UAUACUGUCCAUCAAUAUCAGCU | 564 | 451-473 |
| AD-1548616.1 | UGAUGGACAGUAUGCAAUGAA | 250 | 460-480 | UUCATUGCAUACUGUCCAUCAAU | 565 | 458-480 |
| AD-1548617.1 | AGUAUGCAAUGACUCGAGCUA | 40 | 468-488 | UAGCTCGAGUCAUUGCAUACUGU | 341 | 466-488 |
| AD-1548618.1 | AGCUCAGAGGGUACGAGCUGA | 251 | 484-504 | UCAGCUCGUACCCUCUGAGCUCG | 566 | 482-504 |
| AD-1548619.1 | CUCAGAGGGUACGAGCUGCUA | 252 | 486-506 | UAGCAGCUCGUACCCUCUGAGCU | 567 | 484-506 |
| AD-1548620.1 | AGAGGGUACGAGCUGCUAUGA | 253 | 489-509 | UCAUAGCAGCUCGUACCCUCUGA | 568 | 487-509 |
| AD-1548621.1 | GCUAUGUUCCCUGAGACAUUA | 254 | 503-523 | UAAUGUCUCAGGGAACAUAGCAG | 569 | 501-523 |
| AD-1548622.1 | AGCGUUUGGCUGAACCAUCAA | 255 | 582-602 | UUGATGGUUCAGCCAAACGCUGG | 570 | 580-602 |
| AD-1548623.1 | UGCUGAAACAUGCAGUUGUAA | 256 | 606-626 | UUACAACUGCAUGUUUCAGCAUC | 571 | 604-626 |
| AD-1548624.1 | CAUGCAGUUGUAAACUUGAUA | 257 | 614-634 | UAUCAAGUUUACAACUGCAUGUU | 572 | 612-634 |
| AD-1548625.1 | GCAGUUGUAAACUUGAUUAAA | 258 | 617-637 | UUUAAUCAAGUUUACAACUGCAU | 573 | 615-637 |
| AD-1548626.1 | UGAUUAACUAUCAAGAUGAUA | 259 | 630-650 | UAUCAUCUUGAUAGUUAAUCAAG | 574 | 628-650 |
| AD-1548627.1 | CAGAACUUGCCACACGUGCAA | 260 | 651-671 | UUGCACGUGUGGCAAGUUCUGCA | 575 | 649-671 |
| AD-1548628.1 | CACACGUGCAAUCCCUGAACA | 261 | 661-681 | UGUUCAGGGAUUGCACGUGUGGC | 576 | 659-681 |
| AD-1548629.1 | GUGCAAUCCCUGAACUGACAA | 262 | 666-686 | UUGUCAGUUCAGGGAUUGCACGU | 577 | 664-686 |
| AD-1548630.1 | GAGGACCAGGUGGUGGUUAAA | 263 | 701-721 | UUUAACCACCACCUGGUCCUCGU | 578 | 699-721 |
| AD-1548631.1 | GUGGUGGUUAAUAAGGCUGCA | 264 | 710-730 | UGCAGCCUUAUUAACCACCACCU | 579 | 708-730 |
| AD-1548632.1 | UGCAGAAUACAAAUGAUGUAA | 265 | 819-839 | UUACAUCAUUUGUAUUCUGCAUG | 580 | 817-839 |
| AD-1548633.1 | AGAAUACAAAUGAUGUAGAAA | 266 | 822-842 | UUUCTACAUCAUUUGUAUUCUGC | 581 | 820-842 |
| AD-1548634.1 | UGAUGUAGAAACAGCUCGUUA | 70 | 832-852 | UAACGAGCUGUUUCUACAUCAUU | 582 | 830-852 |
| AD-1548635.1 | CUUGCAUAACCUUUCCCAUCA | 267 | 865-885 | UGAUGGGAAAGGUUAUGCAAGGU | 583 | 863-885 |
| AD-1548636.1 | UUGCAUAACCUUUCCCAUCAA | 268 | 866-886 | UUGATGGGAAAGGUUAUGCAAGG | 584 | 864-886 |
| AD-1548637.1 | CCAUCUUUAAGUCUGGAGGCA | 269 | 903-923 | UGCCTCCAGACUUAAAGAUGGCC | 585 | 901-923 |
| AD-1548638.1 | GCCAUUACAACUCUCCACAAA | 270 | 977-997 | UUUGTGGAGAGUUGUAAUGGCAU | 586 | 975-997 |
| AD-1548639.1 | GUUGCCUUGCUCAACAAAACA | 271 | 1061-1081 | UGUUTUGUUGAGCAAGGCAACCA | 587 | 1059-1081 |
| AD-1548640.1 | AUUCUUGGCUAUUACGACAGA | 84 | 1090-1110 | UCUGTCGUAAUAGCCAAGAAUUU | 389 | 1088-1110 |
| AD-1548641.1 | AAAUAUAAUGAGGACCUAUAA | 272 | 1189-1209 | UUAUAGGUCCUCAUUAUAUUUAC | 588 | 1187-1209 |
| AD-1548642.1 | AAUAUAAUGAGGACCUAUACA | 273 | 1190-1210 | UGUATAGGUCCUCAUUAUAUUUA | 589 | 1188-1210 |
| AD-1548643.1 | GCAGAGUGCUGAAGGUGCUAA | 274 | 1236-1256 | UUAGCACCUUCAGCACUCUGCUU | 590 | 1234-1256 |
| AD-1548644.1 | UUCUGGGUUCAGAUGAUAUAA | 275 | 1437-1457 | UUAUAUCAUCUGAACCCAGAAGC | 591 | 1435-1457 |
| AD-1548645.1 | GAUGAUAUAAAUGUGGUCACA | 276 | 1448-1468 | UGUGACCACAUUUAUAUCAUCUG | 592 | 1446-1468 |
| AD-1548646.1 | GGAAUUCUUUCUAACCUCACA | 277 | 1478-1498 | UGUGAGGUUAGAAAGAAUUCCAG | 593 | 1476-1498 |
| AD-1548647.1 | UCUUUCUAACCUCACUUGCAA | 278 | 1483-1503 | UUGCAAGUGAGGUUAGAAAGAAU | 594 | 1481-1503 |
| AD-1548648.1 | UUCUAACCUCACUUGCAAUAA | 279 | 1486-1506 | UUAUTGCAAGUGAGGUUAGAAAG | 595 | 1484-1506 |
| AD-1548649.1 | UCUAACCUCACUUGCAAUAAA | 280 | 1487-1507 | UUUATUGCAAGUGAGGUUAGAAA | 596 | 1485-1507 |
| AD-1548650.1 | AAGUGGGUGGUAUAGAGGCUA | 281 | 1533-1553 | UAGCCUCUAUACCACCCACUUGG | 597 | 1531-1553 |
| AD-1548651.1 | UGGGUGGUAUAGAGGCUCUUA | 282 | 1536-1556 | UAAGAGCCUCUAUACCACCCACU | 598 | 1534-1556 |
| AD-1548652.1 | AGCCUGCCAUCUGUGCUCUUA | 283 | 1599-1619 | UAAGAGCACAGAUGGCAGGCUCA | 599 | 1597-1619 |
| AD-1548653.1 | GCCUGCCAUCUGUGCUCUUCA | 284 | 1600-1620 | UGAAGAGCACAGAUGGCAGGCUC | 600 | 1598-1620 |
| AD-1548654.1 | CAUCUGUGCUCUUCGUCAUCA | 285 | 1606-1626 | UGAUGACGAAGAGCACAGAUGGC | 601 | 1604-1626 |
| AD-1548655.1 | GCUCUUCGUCAUCUGACCAGA | 286 | 1613-1633 | UCUGGUCAGAUGACGAAGAGCAC | 602 | 1611-1633 |
| AD-1548656.1 | AUGCAGUUCGCCUUCACUAUA | 287 | 1662-1682 | UAUAGUGAAGGCGAACUGCAUUC | 603 | 1660-1682 |
| AD-1548657.1 | UGGUUAAGCUCUUACACCCAA | 288 | 1695-1715 | UUGGGUGUAAGAGCUUAACCACA | 604 | 1693-1715 |
| AD-1548658.1 | CUGUUGGAUUGAUUCGAAAUA | 135 | 1743-1763 | UAUUTCGAAUCAAUCCAACAGUA | 443 | 1741-1763 |
| AD-1548659.1 | UGUUGGAUUGAUUCGAAAUCA | 289 | 1744-1764 | UGAUTUCGAAUCAAUCCAACAGU | 605 | 1742-1764 |
| AD-1548660.1 | CGUGAGCAGGGUGCCAUUCCA | 290 | 1796-1816 | UGGAAUGGCACCCUGCUCACGCA | 606 | 1794-1816 |
| AD-1548661.1 | CCACGACUAGUUCAGUUGCUA | 141 | 1814-1834 | UAGCAACUGAACUAGUCGUGGAA | 450 | 1812-1834 |
| AD-1548662.1 | UUCAGUUGCUUGUUCGUGCAA | 142 | 1824-1844 | UUGCACGAACAAGCAACUGAACU | 607 | 1822-1844 |
| AD-1548663.1 | UCAGUUGCUUGUUCGUGCACA | 291 | 1825-1845 | UGUGCACGAACAAGCAACUGAAC | 608 | 1823-1845 |
| AD-1548664.1 | AGUUGCUUGUUCGUGCACAUA | 292 | 1827-1847 | UAUGTGCACGAACAAGCAACUGA | 609 | 1825-1847 |
| AD-1548665.1 | CAGAGGACUAAAUACCAUUCA | 293 | 1984-2004 | UGAATGGUAUUUAGUCCUCUGAU | 610 | 1982-2004 |
| AD-1548666.1 | GACUAAAUACCAUUCCAUUGA | 294 | 1989-2009 | UCAATGGAAUGGUAUUUAGUCCU | 611 | 1987-2009 |
| AD-1548667.1 | CCAUUCCAUUGUUUGUGCAGA | 160 | 1998-2018 | UCUGCACAAACAAUGGAAUGGUA | 471 | 1996-2018 |
| AD-1548668.1 | AUUCCAUUGUUUGUGCAGCUA | 295 | 2000-2020 | UAGCTGCACAAACAAUGGAAUGG | 612 | 1998-2020 |
| AD-1548669.1 | UUCCAUUGUUUGUGCAGCUGA | 296 | 2001-2021 | UCAGCUGCACAAACAAUGGAAUG | 613 | 1999-2021 |
| AD-1548670.1 | CCAUUGUUUGUGCAGCUGCUA | 297 | 2003-2023 | UAGCAGCUGCACAAACAAUGGAA | 614 | 2001-2023 |
| AD-1548671.1 | GCCACAGCUCCUCUGACAGAA | 298 | 2120-2140 | UUCUGUCAGAGGAGCUGUGGCUC | 615 | 2118-2140 |
| AD-1548672.1 | AAGCCACAAGAUUACAAGAAA | 299 | 2210-2230 | UUUCTUGUAAUCUUGUGGCUUGU | 616 | 2208-2230 |
| AD-1548673.1 | CCACAAGAUUACAAGAAACGA | 300 | 2213-2233 | UCGUTUCUUGUAAUCUUGUGGCU | 617 | 2211-2233 |
| AD-1548674.1 | AAGAUUACAAGAAACGGCUUA | 171 | 2217-2237 | UAAGCCGUUUCUUGUAAUCUUGU | 618 | 2215-2237 |
| AD-1548675.1 | AUUACAAGAAACGGCUUUCAA | 301 | 2220-2240 | UUGAAAGCCGUUUCUUGUAAUCU | 619 | 2218-2240 |
| AD-1548676.1 | GGCUUUCAGUUGAGCUGACCA | 302 | 2232-2252 | UGGUCAGCUCAACUGAAAGCCGU | 620 | 2230-2252 |
| AD-1548677.1 | UGAGCUGACCAGCUCUCUCUA | 303 | 2242-2262 | UAGAGAGAGCUGGUCAGCUCAAC | 621 | 2240-2262 |
| AD-1548678.1 | GAGCCAAUGGCUUGGAAUGAA | 304 | 2270-2290 | UUCATUCCAAGCCAUUGGCUCUG | 622 | 2268-2290 |
| AD-1548679.1 | CUGAUCUUGGACUUGAUAUUA | 305 | 2295-2315 | UAAUAUCAAGUCCAAGAUCAGCA | 623 | 2293-2315 |
| AD-1548680.1 | UGGUUUGAUACUGACCUGUAA | 306 | 2540-2560 | UUACAGGUCAGUAUCAAACCAGG | 624 | 2538-2560 |
| AD-1548681.1 | UUUGAUACUGACCUGUAAAUA | 307 | 2543-2563 | UAUUTACAGGUCAGUAUCAAACC | 625 | 2541-2563 |
| AD-1548682.1 | GGCUAUUUGUAAAUCUGCCAA | 308 | 2666-2686 | UUGGCAGAUUUACAAAUAGCCUA | 626 | 2664-2686 |
| AD-1548683.1 | UUUCUGGUUGUUAUGUGAUCA | 309 | 2743-2763 | UGAUCACAUAACAACCAGAAAUC | 627 | 2741-2763 |
| AD-1548684.1 | GAUCAUGUGUGGAAGUUAUUA | 192 | 2759-2779 | UAAUAACUUCCACACAUGAUCAC | 505 | 2757-2779 |
| AD-1548685.1 | UAAUACUCAAAUGAGUAACAA | 310 | 2813-2833 | UUGUTACUCAUUUGAGUAUUAAG | 628 | 2811-2833 |
| AD-1548686.1 | AUUGUCUGAACUUGCAUUGUA | 197 | 2882-2902 | UACAAUGCAAGUUCAGACAAUAC | 629 | 2880-2902 |
| AD-1548687.1 | CAGAAAGUGCCUGACACACUA | 311 | 2951-2971 | UAGUGUGUCAGGCACUUUCUGAG | 630 | 2949-2971 |
| AD-1548688.1 | GAAAGUGCCUGACACACUAAA | 312 | 2953-2973 | UUUAGUGUGUCAGGCACUUUCUG | 631 | 2951-2973 |
| AD-1548689.1 | GCCUGACACACUAACCAAGCA | 313 | 2959-2979 | UGCUTGGUUAGUGUGUCAGGCAC | 632 | 2957-2979 |
| AD-1548690.1 | UGGGAACAAUUGAAGUAAACA | 314 | 2990-3010 | UGUUTACUUCAAUUGUUCCCAUA | 633 | 2988-3010 |
| AD-1548691.1 | AUGGAUCACAAGAUGGAAUUA | 315 | 3093-3113 | UAAUTCCAUCUUGUGAUCCAUUC | 634 | 3091-3113 |
| AD-1548692.1 | UUUAUCAAACCCUAGCCUUGA | 316 | 3111-3131 | UCAAGGCUAGGGUUUGAUAAAUU | 635 | 3109-3131 |
| AD-1548693.1 | UAUCUGUAAUGGUACUGACUA | 317 | 3164-3184 | UAGUCAGUACCAUUACAGAUAUU | 636 | 3162-3184 |
| AD-1548694.1 | UUGCUUGCUUUGAAGUAGCUA | 318 | 3184-3204 | UAGCTACUUCAAAGCAAGCAAAG | 637 | 3182-3204 |
| AD-1548695.1 | AGUGUUAAGUUAUAGUGAAUA | 319 | 3257-3277 | UAUUCACUAUAACUUAACACUAC | 638 | 3255-3277 |
| AD-1548696.1 | UGUUAAGUUAUAGUGAAUACA | 320 | 3259-3279 | UGUATUCACUAUAACUUAACACU | 639 | 3257-3279 |
| AD-1548697.1 | GUAAUGGUGUAGAACACUAAA | 321 | 3311-3331 | UUUAGUGUUCUACACCAUUACUC | 640 | 3309-3331 |
| AD-1548698.1 | AAUGGUGUAGAACACUAAUUA | 322 | 3313-3333 | UAAUTAGUGUUCUACACCAUUAC | 641 | 3311-3333 |
| AD-1548699.1 | CUAAUUCAUAAUCACUCUAAA | 323 | 3327-3347 | UUUAGAGUGAUUAUGAAUUAGUG | 642 | 3325-3347 |
| AD-1548700.1 | UUUGGGAUAUGUAUGGGUAGA | 233 | 3489-3509 | UCUACCCAUACAUAUCCCAAAUA | 548 | 3487-3509 |
| AD-1548701.1 | GGGUAAAUCAGUAAGAGGUGA | 238 | 3508-3528 | UCACCUCUUACUGAUUUACCCUA | 643 | 3506-3528 |
| AD-1548702.1 | GUAAAUCAGUAAGAGGUGUUA | 239 | 3510-3530 | UAACACCUCUUACUGAUUUACCC | 554 | 3508-3530 |
| AD-1548703.1 | UAAAUCAGUAAGAGGUGUUAA | 324 | 3511-3531 | UUAACACCUCUUACUGAUUUACC | 644 | 3509-3531 |
| AD-1548704.1 | AAUCAGUAAGAGGUGUUAUUA | 241 | 3513-3533 | UAAUAACACCUCUUACUGAUUUA | 556 | 3511-3533 |

TABLE 3
Modified Sense and Antisense Strand Sequences of CTNNB1 dsRNA Agents

| | | SEQ | | SEQ | | SEQ |
|---|---|---|---|---|---|---|
| Duplex | | ID | | ID | | ID |
| Name | Sense Sequence 5′ to 3′ | NO: | Antisense Sequence 5′ to 3′ | NO: | mRNA Target Sequence | NO: |
| AD- | gsasggguAfuUfUfGfaaguauacscsa | 645 | VPuGfgudAu(Agn)cuucaaAfuAfcccucsasg | 984 | CUGAGGGUAUUUGAAGUAUACCA | 1323 |
| 1548365.1 | | | | | | |
| AD- | gsasggguauUfUfGfaaguauacscsa | 646 | VPudGgudAudAcuucdAaAfuacccucsasg | 985 | CUGAGGGUAUUUGAAGUAUACCA | 1323 |
| 1548366.1 | | | | | | |
| AD- | gsgsguauUfuGfAfAfguauaccasusa | 647 | VPuAfugdGu(Agn)uacuucAfaAfuacccsusc | 986 | GAGGGUAUUUGAAGUAUACCAUA | 1324 |
| 1548367.1 | | | | | | |
| AD- | gsgsuauuUfgAfAfGfuauaccausasa | 648 | VPuUfaudGg(Tgn)auacuuCfaAfauaccscsu | 987 | AGGGUAUUUGAAGUAUACCAUAC | 1325 |
| 1548368.1 | | | | | | |
| AD- | ususugaaGfuAfUfAfccauacaascsa | 649 | VPuGfuudGu(Agn)ugguauAfcUfucaaasusa | 988 | UAUUUGAAGUAUACCAUACAACU | 1326 |
| 1548369.1 | | | | | | |
| AD- | ususgaagUfaUfAfCfcauacaacsusa | 650 | VPuAfgudTg(Tgn)augguaUfaCfuucaasasu | 989 | AUUUGAAGUAUACCAUACAACUG | 1327 |
| 1548370.1 | | | | | | |
| AD- | usgsgacaAfuGfGfCfuacucaagscsa | 651 | VPuGfcudTg(Agn)guagccAfuUfguccascsg | 990 | CGUGGACAAUGGCUACUCAAGCU | 1328 |
| 1548371.1 | | | | | | |
| AD- | gsascaauggCfUfAfcucaagcusgsa | 652 | VPudCagdCudTgagudAgCfcauugucscsa | 991 | UGGACAAUGGCUACUCAAGCUGA | 1329 |
| 1548372.1 | | | | | | |
| AD- | ascsaaugGfcUfAfCfucaagcugsasa | 653 | VPuUfcadGc(Tgn)ugaguaGfcCfauuguscsc | 992 | GGACAAUGGCUACUCAAGCUGAU | 1330 |
| 1548373.1 | | | | | | |
| AD- | asasgcugauUfUfGfauggaguusgsa | 654 | VPudCaadCudCcaucdAaAfucagcuusgsa | 993 | UCAAGCUGAUUUGAUGGAGUUGG | 1331 |
| 1548374.1 | | | | | | |
| AD- | asgscugauuUfGfAfuggaguugsgsa | 655 | VPudCcadAcdTccaudCaAfaucagcususg | 994 | CAAGCUGAUUUGAUGGAGUUGGA | 1332 |
| 1548375.1 | | | | | | |
| AD- | cscsuucucuGfAfGfugguaaagsgsa | 656 | VPudCcudTudAccacdTcAfgagaaggsasg | 995 | CUCCUUCUCUGAGUGGUAAAGGC | 1333 |
| 1548376.1 | | | | | | |
| AD- | csasguccUfuCfAfCfucaagaacsasa | 657 | VPuUfgudTc(Tgn)ugagugAfaGfgacugsasg | 996 | CUCAGUCCUUCACUCAAGAACAA | 1334 |
| 1548377.1 | | | | | | |
| AD- | csusucacucAfAfGfaacaaguasgsa | 658 | VPudCuadCudTguucdTuGfagugaagsgsa | 997 | UCCUUCACUCAAGAACAAGUAGC | 1335 |
| 1548378.1 | | | | | | |
| AD- | csascucaagAfAfCfaaguagcusgsa | 659 | VPudCagdCudAcuugdTuCfuugagugsasa | 998 | UUCACUCAAGAACAAGUAGCUGA | 1336 |
| 1548379.1 | | | | | | |
| AD- | gsusagcuGfaUfAfUfugauggacsasa | 660 | VPuUfgudCc(Agn)ucaauaUfcAfgcuacsusu | 999 | AAGUAGCUGAUAUUGAUGGACAG | 1337 |
| 1548380.1 | | | | | | |
| AD- | asusugauGfgAfCfAfguaugcaasusa | 661 | VPuAfuudGc(Agn)uacuguCfcAfucaausasu | 1000 | AUAUUGAUGGACAGUAUGCAAUG | 1338 |
| 1548381.1 | | | | | | |
| AD- | asgsuaugcaAfUfGfacucgagcsusa | 662 | VPudAgcdTcdGagucdAuUfgcauacusgsu | 1001 | ACAGUAUGCAAUGACUCGAGCUC | 1339 |
| 1548382.1 | | | | | | |
| AD- | gsgsuacgAfgCfUfGfcuauguucscsa | 663 | VPuGfgadAc(Agn)uagcagCfuCfguaccscsu | 1002 | AGGGUACGAGCUGCUAUGUUCCC | 1340 |
| 1548383.1 | | | | | | |
| AD- | ascsgagcugCfUfAfuguucccusgsa | 664 | VPudCagdGgdAacaudAgCfagcucgusasc | 1003 | GUACGAGCUGCUAUGUUCCCUGA | 1341 |
| 1548384.1 | | | | | | |
| AD- | usgsuucccuGfAfGfacauuagasusa | 665 | VPudAucdTadAugucdTcAfgggaacasusa | 1004 | UAUGUUCCCUGAGACAUUAGAUG | 1342 |
| 1548385.1 | | | | | | |
| AD- | ususcccuGfaGfAfCfauuagaugsasa | 666 | VPuUfcadTc(Tgn)aaugucUfcAfgggaascsa | 1005 | UGUUCCCUGAGACAUUAGAUGAG | 1343 |
| 1548386.1 | | | | | | |
| AD- | asgsaugaGfgGfCfAfugcagaucscsa | 667 | VPuGfgadTc(Tgn)gcaugcCfcUfcaucusasa | 1006 | UUAGAUGAGGGCAUGCAGAUCCC | 1344 |
| 1548387.1 | | | | | | |
| AD- | csusgcucauCfCfCfacuaauguscsa | 668 | VPudGacdAudTagugdGgAfugagcagscsa | 1007 | UGCUGCUCAUCCCACUAAUGUCC | 1345 |
| 1548388.1 | | | | | | |
| AD- | ascscaucAfcAfGfAfugcugaaascsa | 669 | VPuGfuudTc(Agn)gcaucuGfuGfauggususc | 1008 | GAACCAUCACAGAUGCUGAAACA | 1346 |
| 1548389.1 | | | | | | |
| AD- | csasucacAfgAfUfGfcugaaacasusa | 670 | VPuAfugdTu(Tgn)cagcauCfuGfugaugsgsu | 1009 | ACCAUCACAGAUGCUGAAACAUG | 1347 |
| 1548390.1 | | | | | | |
| AD- | csasucacagAfUfGfcugaaacasusa | 671 | VPudAugdTudTcagcdAuCfugugaugsgsu | 1010 | ACCAUCACAGAUGCUGAAACAUG | 1347 |
| 1548391.1 | | | | | | |
| AD- | asusgcugAfaAfCfAfugcaguugsusa | 672 | VPuAfcadAc(Tgn)gcauguUfuCfagcauscsu | 1011 | AGAUGCUGAAACAUGCAGUUGUA | 1348 |
| 1548392.1 | | | | | | |
| AD- | asusgcugaaAfCfAfugcaguugsusa | 673 | VPudAcadAcdTgcaudGuUfucagcauscsu | 1012 | AGAUGCUGAAACAUGCAGUUGUA | 1348 |
| 1548393.1 | | | | | | |
| AD- | ascsaugcAfgUfUfGfuaaacuugsasa | 674 | VPuUfcadAg(Tgn)uuacaaCfuGfcaugususu | 1013 | AAACAUGCAGUUGUAAACUUGAU | 1349 |
| 1548394.1 | | | | | | |
| AD- | asusgcagUfuGfUfAfaacuugaususa | 675 | VPuAfaudCa(Agn)guuuacAfaCfugcausgsu | 1014 | ACAUGCAGUUGUAAACUUGAUUA | 1350 |
| 1548395.1 | | | | | | |
| AD- | asusgcaguuGfUfAfaacuugaususa | 676 | VPudAaudCadAguuudAcAfacugcausgsu | 1015 | ACAUGCAGUUGUAAACUUGAUUA | 1350 |
| 1548396.1 | | | | | | |
| AD- | ascsgugcAfaUfCfCfcugaacugsasa | 677 | VPuUfcadGu(Tgn)cagggaUfuGfcacgusgsu | 1016 | ACACGUGCAAUCCCUGAACUGAC | 1351 |
| 1548397.1 | | | | | | |
| AD- | usgscaauCfcCfUfGfaacugacasasa | 678 | VPuUfugdTc(Agn)guucagGfgAfuugcascsg | 1017 | CGUGCAAUCCCUGAACUGACAAA | 1352 |
| 1548398.1 | | | | | | |
| AD- | gsasccagGfuGfGfUfgguuaauasasa | 679 | VPuUfuadTu(Agn)accaccAfcCfuggucscsu | 1018 | AGGACCAGGUGGUGGUUAAUAAG | 1353 |
| 1548399.1 | | | | | | |
| AD- | gsasccagguGfGfUfgguuaauasasa | 680 | VPudTuadTudAaccadCcAfccuggucscsu | 1019 | AGGACCAGGUGGUGGUUAAUAAG | 1353 |
| 1548400.1 | | | | | | |
| AD- | cscsagguggUfGfGfuuaauaagsgsa | 681 | VPudCcudTadTuaacdCaCfcaccuggsusc | 1020 | GACCAGGUGGUGGUUAAUAAGGC | 1354 |
| 1548401.1 | | | | | | |
| AD- | gsusuaauAfaGfGfCfugcaguuasusa | 682 | VPuAfuadAc(Tgn)gcagccUfuAfuuaacscsa | 1021 | UGGUUAAUAAGGCUGCAGUUAUG | 1355 |
| 1548402.1 | | | | | | |
| AD- | cscsucagAfuGfGfUfgucugcuasusa | 683 | VPuAfuadGc(Agn)gacaccAfuCfugaggsasg | 1022 | CUCCUCAGAUGGUGUCUGCUAUU | 1356 |
| 1548403.1 | | | | | | |
| AD- | uscsagauggUfGfUfcugcuauusgsa | 684 | VPudCaadTadGcagadCaCfcaucugasgsg | 1023 | CCUCAGAUGGUGUCUGCUAUUGU | 1357 |
| 1548404.1 | | | | | | |
| AD- | asgsauggUfgUfCfUfgcuauugusasa | 685 | VPuUfacdAa(Tgn)agcagaCfaCfcaucusgsa | 1024 | UCAGAUGGUGUCUGCUAUUGUAC | 1358 |
| 1548405.1 | | | | | | |
| AD- | asgsauggugUfCfUfgcuauugusasa | 686 | VPudTacdAadTagcadGaCfaccaucusgsa | 1025 | UCAGAUGGUGUCUGCUAUUGUAC | 1358 |
| 1548406.1 | | | | | | |
| AD- | ascsguacCfaUfGfCfagaauacasasa | 687 | VPuUfugdTa(Tgn)ucugcaUfgGfuacgusasc | 1026 | GUACGUACCAUGCAGAAUACAAA | 1359 |
| 1548407.1 | | | | | | |
| AD- | ascsguaccaUfGfCfagaauacasasa | 688 | VPudTugdTadTucugdCaUfgguacgusasc | 1027 | GUACGUACCAUGCAGAAUACAAA | 1359 |
| 1548408.1 | | | | | | |
| AD- | csgsuaccAfuGfCfAfgaauacaasasa | 689 | VPuUfuudGu(Agn)uucugcAfuGfguacgsusa | 1028 | UACGUACCAUGCAGAAUACAAAU | 1360 |
| 1548409.1 | | | | | | |
| AD- | gsusaccaUfgCfAfGfaauacaaasusa | 690 | VPuAfuudTg(Tgn)auucugCfaUfgguacsgsu | 1029 | ACGUACCAUGCAGAAUACAAAUG | 1361 |
| 1548410.1 | | | | | | |
| AD- | usasccaugcAfGfAfauacaaausgsa | 691 | VPudCaudTudGuauudCuGfcaugguascsg | 1030 | CGUACCAUGCAGAAUACAAAUGA | 1362 |
| 1548411.1 | | | | | | |
| AD- | ascscaugcaGfAfAfuacaaaugsasa | 692 | VPudTcadTudTguaudTcUfgcauggusasc | 1031 | GUACCAUGCAGAAUACAAAUGAU | 1363 |
| 1548412.1 | | | | | | |
| AD- | cscsaugcagAfAfUfacaaaugasusa | 693 | VPudAucdAudTuguadTuCfugcauggsusa | 1032 | UACCAUGCAGAAUACAAAUGAUG | 1364 |
| 1548413.1 | | | | | | |
| AD- | csasugcagaAfUfAfcaaaugausgsa | 694 | VPudCaudCadTuugudAuUfcugcaugsgsu | 1033 | ACCAUGCAGAAUACAAAUGAUGU | 1365 |
| 1548414.1 | | | | | | |
| AD- | asusgcagAfaUfAfCfaaaugaugsusa | 695 | VPuAfcadTc(Agn)uuuguaUfuCfugcausgsg | 1034 | CCAUGCAGAAUACAAAUGAUGUA | 1366 |
| 1548415.1 | | | | | | |
| AD- | gscsagaauaCfAfAfaugauguasgsa | 696 | VPudCuadCadTcauudTgUfauucugesasu | 1035 | AUGCAGAAUACAAAUGAUGUAGA | 1367 |
| 1548416.1 | | | | | | |
| AD- | csasgaauAfcAfAfAfugauguagsasa | 697 | VPuUfcudAc(Agn)ucauuuGfuAfuucugscsa | 1036 | UGCAGAAUACAAAUGAUGUAGAA | 1368 |
| 1548417.1 | | | | | | |
| AD- | usgsauguagAfAfAfcagcucgususa | 698 | VPudAacdGadGcugudTuCfuacaucasusu | 1037 | AAUGAUGUAGAAACAGCUCGUUG | 1369 |
| 1548418.1 | | | | | | |
| AD- | gsasuguagaAfAfCfagcucguusgsa | 699 | VPudCaadCgdAgcugdTuUfcuacaucsasu | 1038 | AUGAUGUAGAAACAGCUCGUUGU | 1370 |
| 1548419.1 | | | | | | |
| AD- | ascsuggccaUfCfUfuuaagucusgsa | 700 | VPudCagdAcdTuaaadGaUfggccagusasa | 1039 | UUACUGGCCAUCUUUAAGUCUGG | 1371 |
| 1548420.1 | | | | | | |
| AD- | csusggccauCfUfUfuaagucugsgsa | 701 | VPudCcadGadCuuaadAgAfuggccagsusa | 1040 | UACUGGCCAUCUUUAAGUCUGGA | 1372 |
| 1548421.1 | | | | | | |
| AD- | usgsgccaUfcUfUfUfaagucuggsasa | 702 | VPuUfccdAg(Agn)cuuaaaGfaUfggccasgsu | 1041 | ACUGGCCAUCUUUAAGUCUGGAG | 1373 |
| 1548422.1 | | | | | | |
| AD- | gsgsccaucuUfUfAfagucuggasgsa | 703 | VPudCucdCadGacuudAaAfgauggccsasg | 1042 | CUGGCCAUCUUUAAGUCUGGAGG | 1374 |
| 1548423.1 | | | | | | |
| AD- | gscscaucuuUfAfAfgucuggagsgsa | 704 | VPudCcudCcdAgacudTaAfagauggcscsa | 1043 | UGGCCAUCUUUAAGUCUGGAGGC | 1375 |
| 1548424.1 | | | | | | |
| AD- | usgsguucacCfAfGfuggauucusgsa | 705 | VPudCagdAadTccacdTgGfugaaccasasg | 1044 | CUUGGUUCACCAGUGGAUUCUGU | 1376 |
| 1548425.1 | | | | | | |
| AD- | ascscaguggAfUfUfcuguguugsusa | 706 | VPudAcadAcdAcagadAuCfcacuggusgsa | 1045 | UCACCAGUGGAUUCUGUGUUGUU | 1377 |
| 1548426.1 | | | | | | |
| AD- | asusggcaGfuGfCfGfuuuagcugsgsa | 707 | VPuCfcadGc(Tgn)aaacgcAfcUfgccaususu | 1046 | AAAUGGCAGUGCGUUUAGCUGGU | 1378 |
| 1548427.1 | | | | | | |
| AD- | asusggcaguGfCfGfuuuagcugsgsa | 708 | VPudCcadGcdTaaacdGcAfcugccaususu | 1047 | AAAUGGCAGUGCGUUUAGCUGGU | 1378 |
| 1548428.1 | | | | | | |
| AD- | ususgccuUfgCfUfCfaacaaaacsasa | 709 | VPuUfgudTu(Tgn)guugagCfaAfggcaascsc | 1048 | GGUUGCCUUGCUCAACAAAACAA | 1379 |
| 1548429.1 | | | | | | |
| AD- | usgsccuugcUfCfAfacaaaacasasa | 710 | VPudTugdTudTuguudGaGfcaaggcasasc | 1049 | GUUGCCUUGCUCAACAAAACAAA | 1380 |
| 1548430.1 | | | | | | |
| AD- | usgsccuuGfcUfCfAfacaaaacasasa | 711 | VPuUfugdTu(Tgn)uguugaGfcAfaggcasasc | 1050 | GUUGCCUUGCUCAACAAAACAAA | 1380 |
| 1548431.1 | | | | | | |
| AD- | gscscuugCfuCfAfAfcaaaacaasasa | 712 | VPuUfuudGu(Tgn)uuguugAfgCfaaggcsasa | 1051 | UUGCCUUGCUCAACAAAACAAAU | 1381 |
| 1548432.1 | | | | | | |
| AD- | ususaaauucUfUfGfgcuauuacsgsa | 713 | VPudCgudAadTagccdAaGfaauuuaascsa | 1052 | UGUUAAAUUCUUGGCUAUUACGA | 1382 |
| 1548433.1 | | | | | | |
| AD- | asusucuuggCfUfAfuuacgacasgsa | 714 | VPudCugdTcdGuaaudAgCfcaagaaususu | 1053 | AAAUUCUUGGCUAUUACGACAGA | 1383 |
| 1548434.1 | | | | | | |
| AD- | gsgscuauUfaCfGfAfcagacugcscsa | 715 | VPuGfgcdAg(Tgn)cugucgUfaAfuagccsasa | 1054 | UUGGCUAUUACGACAGACUGCCU | 1384 |
| 1548435.1 | | | | | | |
| AD- | usascgacAfgAfCfUfgccuucaasasa | 716 | VPuUfuudGa(Agn)ggcaguCfuGfucguasasu | 1055 | AUUACGACAGACUGCCUUCAAAU | 1385 |
| 1548436.1 | | | | | | |
| AD- | csusuuaguaAfAfUfauaaugagsgsa | 717 | VPudCcudCadTuauadTuUfacuaaagscsu | 1056 | AGCUUUAGUAAAUAUAAUGAGGA | 1386 |
| 1548437.1 | | | | | | |
| AD- | usasuaaugaGfGfAfccuauacususa | 718 | VPudAagdTadTaggudCcUfcauuauasusu | 1057 | AAUAUAAUGAGGACCUAUACUUA | 1387 |
| 1548438.1 | | | | | | |
| AD- | asgscuggUfgGfAfAfugcaagcususa | 719 | VPuAfagdCu(Tgn)gcauucCfaCfcagcususc | 1058 | GAAGCUGGUGGAAUGCAAGCUUU | 1388 |
| 1548439.1 | | | | | | |
| AD- | csasgauccaAfGfUfcaacgucususa | 720 | VPudAagdAcdGuugadCuUfggaucugsusc | 1059 | GACAGAUCCAAGUCAACGUCUUG | 1389 |
| 1548440.1 | | | | | | |
| AD- | cscsaaguCfaAfCfGfucuuguucsasa | 721 | VPuUfgadAc(Agn)agacguUfgAfcuuggsasu | 1060 | AUCCAAGUCAACGUCUUGUUCAG | 1390 |
| 1548441.1 | | | | | | |
| AD- | cscsaagucaAfCfGfucuuguucsasa | 722 | VPudTgadAcdAagacdGuUfgacuuggsasu | 1061 | AUCCAAGUCAACGUCUUGUUCAG | 1390 |
| 1548442.1 | | | | | | |
| AD- | asgsaacuGfuCfUfUfuggacucuscsa | 723 | VPuGfagdAg(Tgn)ccaaagAfcAfguucusgsa | 1062 | UCAGAACUGUCUUUGGACUCUCA | 1391 |
| 1548443.1 | | | | | | |
| AD- | csusuucaGfaUfGfCfugcaacuasasa | 724 | VPuUfuadGu(Tgn)gcagcaUfcUfgaaagsasu | 1063 | AUCUUUCAGAUGCUGCAACUAAA | 1392 |
| 1548444.1 | | | | | | |
| AD- | uscsagauGfcUfGfCfaacuaaacsasa | 725 | VPuUfgudTu(Agn)guugcaGfcAfucugasasa | 1064 | UUUCAGAUGCUGCAACUAAACAG | 1393 |
| 1548445.1 | | | | | | |
| AD- | gsasugcuGfcAfAfCfuaaacaggsasa | 726 | VPuUfccdTg(Tgn)uuaguuGfcAfgcaucsusg | 1065 | CAGAUGCUGCAACUAAACAGGAA | 1394 |
| 1548446.1 | | | | | | |
| AD- | csusgcaacuAfAfAfcaggaaggsgsa | 727 | VPudCccdTudCcugudTuAfguugcagscsa | 1066 | UGCUGCAACUAAACAGGAAGGGA | 1395 |
| 1548447.1 | | | | | | |
| AD- | gsasagggAfuGfGfAfaggucuccsusa | 728 | VPuAfggdAg(Agn)ccuuccAfuCfccuucscsu | 1067 | AGGAAGGGAUGGAAGGUCUCCUU | 1396 |
| 1548448.1 | | | | | | |
| AD- | csusucugGfgUfUfCfagaugauasusa | 729 | VPuAfuadTc(Agn)ucugaaCfcCfagaagscsu | 1068 | AGCUUCUGGGUUCAGAUGAUAUA | 1397 |
| 1548449.1 | | | | | | |
| AD- | cscsugugcaGfCfUfggaauucususa | 730 | VPudAagdAadTuccadGcUfgcacaggsusg | 1069 | CACCUGUGCAGCUGGAAUUCUUU | 1398 |
| 1548450.1 | | | | | | |
| AD- | usgsugcagcUfGfGfaauucuuuscsa | 731 | VPudGaadAgdAauucdCaGfcugcacasgsg | 1070 | CCUGUGCAGCUGGAAUUCUUUCU | 1399 |
| 1548451.1 | | | | | | |
| AD- | asasuucuUfuCfUfAfaccucacususa | 732 | VPuAfagdTg(Agn)gguuagAfaAfgaauuscsc | 1071 | GGAAUUCUUUCUAACCUCACUUG | 1400 |
| 548452.1 | | | | | | |
| AD- | ususcuuucuAfAfCfcucacuugscsa | 733 | VPudGcadAgdTgaggdTuAfgaaagaasusu | 1072 | AAUUCUUUCUAACCUCACUUGCA | 1401 |
| 1548453.1 | | | | | | |
| AD- | csusuucuAfaCfCfUfcacuugcasasa | 734 | VPuUfugdCa(Agn)gugaggUfuAfgaaagsasa | 1073 | UUCUUUCUAACCUCACUUGCAAU | 1402 |
| 1548454.1 | | | | | | |
| AD- | ususucuaAfcCfUfCfacuugcaasusa | 735 | VPuAfuudGc(Agn)agugagGfuUfagaaasgsa | 1074 | UCUUUCUAACCUCACUUGCAAUA | 1403 |
| 1548455.1 | | | | | | |
| AD- | csusaaccucAfCfUfugcaauaasusa | 736 | VPudAuudAudTgcaadGuGfagguuagsasa | 1075 | UUCUAACCUCACUUGCAAUAAUU | 1404 |
| 1548456.1 | | | | | | |
| AD- | usasaccucaCfUfUfgcaauaaususa | 737 | VPudAaudTadTugcadAgUfgagguuasgsa | 1076 | UCUAACCUCACUUGCAAUAAUUA | 1405 |
| 1548457.1 | | | | | | |
| AD- | asasccucacUfUfGfcaauaauusasa | 738 | VPudTaadTudAuugcdAaGfugagguusasg | 1077 | CUAACCUCACUUGCAAUAAUUAU | 1406 |
| 1548458.1 | | | | | | |
| AD- | ascscucacuUfGfCfaauaauuasusa | 739 | VPudAuadAudTauugdCaAfgugaggususa | 1078 | UAACCUCACUUGCAAUAAUUAUA | 1407 |
| 1548459.1 | | | | | | |
| AD- | cscsucacuuGfCfAfauaauuausasa | 740 | VPudTaudAadTuauudGcAfagugaggsusu | 1079 | AACCUCACUUGCAAUAAUUAUAA | 1408 |
| 1548460.1 | | | | | | |
| AD- | csuscacuUfgCfAfAfuaauuauasasa | 741 | VPuUfuadTa(Agn)uuauugCfaAfgugagsgsu | 1080 | ACCUCACUUGCAAUAAUUAUAAG | 1409 |
| 1548461.1 | | | | | | |
| AD- | csuscacuugCfAfAfuaauuauasasa | 742 | VPudTuadTadAuuaudTgCfaagugagsgsu | 1081 | ACCUCACUUGCAAUAAUUAUAAG | 1409 |
| 1548462.1 | | | | | | |
| AD- | uscsacuugcAfAfUfaauuauaasgsa | 743 | VPudCuudAudAauuadTuGfcaagugasgsg | 1082 | CCUCACUUGCAAUAAUUAUAAGA | 1410 |
| 1548463.1 | | | | | | |
| AD- | csascuugcaAfUfAfauuauaagsasa | 744 | VPudTcudTadTaauudAuUfgcaagugsasg | 1083 | CUCACUUGCAAUAAUUAUAAGAA | 1411 |
| 1548464.1 | | | | | | |
| AD- | csasagugGfgUfGfGfuauagaggscsa | 745 | VPuGfccdTc(Tgn)auaccaCfcCfacuugsgsc | 1084 | GCCAAGUGGGUGGUAUAGAGGCU | 1412 |
| 1548465.1 | | | | | | |
| AD- | gscsucuuGfuGfCfGfuacuguccsusa | 746 | VPuAfggdAc(Agn)guacgcAfcAfagagescsu | 1085 | AGGCUCUUGUGCGUACUGUCCUU | 1413 |
| 1548466.1 | | | | | | |
| AD- | cscsugccauCfUfGfugcucuucsgsa | 747 | VPudCgadAgdAgcacdAgAfuggcaggscsu | 1086 | AGCCUGCCAUCUGUGCUCUUCGU | 1414 |
| 1548467.1 | | | | | | |
| AD- | csusgccaucUfGfUfgcucuucgsusa | 748 | VPudAcgdAadGagcadCaGfauggcagsgsc | 1087 | GCCUGCCAUCUGUGCUCUUCGUC | 1415 |
| 1548468.1 | | | | | | |
| AD- | usgsccaucuGfUfGfcucuucguscsa | 749 | VPudGacdGadAgagcdAcAfgauggcasgsg | 1088 | CCUGCCAUCUGUGCUCUUCGUCA | 1416 |
| 1548469.1 | | | | | | |
| AD- | gscscaucugUfGfCfucuucgucsasa | 750 | VPudTgadCgdAagagdCaCfagauggcsasg | 1089 | CUGCCAUCUGUGCUCUUCGUCAU | 1417 |
| 1548470.1 | | | | | | |
| AD- | cscsaucuguGfCfUfcuucgucasusa | 751 | VPudAugdAcdGaagadGcAfcagauggscsa | 1090 | UGCCAUCUGUGCUCUUCGUCAUC | 1418 |
| 1548471.1 | | | | | | |
| AD- | asuscuguGfcUfCfUfucgucaucsusa | 752 | VPuAfgadTg(Agn)cgaagaGfcAfcagausgsg | 1091 | CCAUCUGUGCUCUUCGUCAUCUG | 1419 |
| 1548472.1 | | | | | | |
| AD- | uscsugugcuCfUfUfcgucaucusgsa | 753 | VPudCagdAudGacgadAgAfgcacagasusg | 1092 | CAUCUGUGCUCUUCGUCAUCUGA | 1420 |
| 1548473.1 | | | | | | |
| AD- | csusgugcUfcUfUfCfgucaucugsasa | 754 | VPuUfcadGa(Tgn)gacgaaGfaGfcacagsasu | 1093 | AUCUGUGCUCUUCGUCAUCUGAC | 1421 |
| 1548474.1 | | | | | | |
| AD- | usgsugcuCfuUfCfGfucaucugascsa | 755 | VPuGfucdAg(Agn)ugacgaAfgAfgcacasgsa | 1094 | UCUGUGCUCUUCGUCAUCUGACC | 1422 |
| 1548475.1 | | | | | | |
| AD- | usgsgacuAfcCfAfGfuugugguusasa | 756 | VPuUfaadCc(Agn)caacugGfuAfguccasusa | 1095 | UAUGGACUACCAGUUGUGGUUAA | 1423 |
| 1548476.1 | | | | | | |
| AD- | gsascuaccaGfUfUfgugguuaasgsa | 757 | VPudCuudAadCcacadAcUfgguagucscsa | 1096 | UGGACUACCAGUUGUGGUUAAGC | 1424 |
| 1548477.1 | | | | | | |
| AD- | usgsugguUfaAfGfCfucuuacacscsa | 758 | VPuGfgudGu(Agn)agagcuUfaAfccacasasc | 1097 | GUUGUGGUUAAGCUCUUACACCC | 1425 |
| 1548478.1 | | | | | | |
| AD- | gsasuaaaggCfUfAfcuguuggasusa | 759 | VPudAucdCadAcagudAgCfcuuuaucsasg | 1098 | CUGAUAAAGGCUACUGUUGGAUU | 1426 |
| 1548479.1 | | | | | | |
| AD- | asusaaagGfcUfAfCfuguuggaususa | 760 | VPuAfaudCc(Agn)acaguaGfcCfuuuauscsa | 1099 | UGAUAAAGGCUACUGUUGGAUUG | 1427 |
| 1548480.1 | | | | | | |
| AD- | asusaaaggcUfAfCfuguuggaususa | 761 | VPudAaudCcdAacagdTaGfccuuuauscsa | 1100 | UGAUAAAGGCUACUGUUGGAUUG | 1427 |
| 1548481.1 | | | | | | |
| AD- | asasggcuAfcUfGfUfuggauugasusa | 762 | VPuAfucdAa(Tgn)ccaacaGfuAfgccuususa | 1101 | UAAAGGCUACUGUUGGAUUGAUU | 1428 |
| 1548482.1 | | | | | | |
| AD- | asasggcuacUfGfUfuggauugasusa | 763 | VPudAucdAadTccaadCaGfuagccuususa | 1102 | UAAAGGCUACUGUUGGAUUGAUU | 1428 |
| 1548483.1 | | | | | | |
| AD- | asgsgcuacuGfUfUfggauugaususa | 764 | VPudAaudCadAuccadAcAfguagccususu | 1103 | AAAGGCUACUGUUGGAUUGAUUC | 1429 |
| 1548484.1 | | | | | | |
| AD- | gsgscuacUfgUfUfGfgauugauuscsa | 765 | VPuGfaadTc(Agn)auccaaCfaGfuagccsusu | 1104 | AAGGCUACUGUUGGAUUGAUUCG | 1430 |
| 1548485.1 | | | | | | |
| AD- | gscsuacuguUfGfGfauugauucsgsa | 766 | VPudCgadAudCaaucdCaAfcaguagcscsu | 1105 | AGGCUACUGUUGGAUUGAUUCGA | 1431 |
| 1548486.1 | | | | | | |
| AD- | csusacuguuGfGfAfuugauucgsasa | 767 | VPudTcgdAadTcaaudCcAfacaguagscsc | 1106 | GGCUACUGUUGGAUUGAUUCGAA | 1432 |
| 1548487.1 | | | | | | |
| AD- | usascuguugGfAfUfugauucgasasa | 20 | VPudTucdGadAucaadTcCfaacaguasgsc | 21 | GCUACUGUUGGAUUGAUUCGAAA | 1433 |
| 1548488.1 | | | | | | |
| AD- | ascsuguuggAfUfUfgauucgaasasa | 768 | VPudTuudCgdAaucadAuCfcaacagusasg | 1107 | CUACUGUUGGAUUGAUUCGAAAU | 1434 |
| 1548489.1 | | | | | | |
| AD- | csusguuggaUfUfGfauucgaaasusa | 769 | VPudAuudTcdGaaucdAaUfccaacagsusa | 1108 | UACUGUUGGAUUGAUUCGAAAUC | 1435 |
| 1548490.1 | | | | | | |
| AD- | gsusuggauuGfAfUfucgaaaucsusa | 770 | VPudAgadTudTogaadTcAfauccaacsasg | 1109 | CUGUUGGAUUGAUUCGAAAUCUU | 1436 |
| 1548491.1 | | | | | | |
| AD- | gsusuggaUfuGfAfUfucgaaaucsusa | 771 | VPuAfgadTu(Tgn)cgaaucAfaUfccaacsasg | 1110 | CUGUUGGAUUGAUUCGAAAUCUU | 1436 |
| 1548492.1 | | | | | | |
| AD- | ususggauugAfUfUfcgaaaucususa | 772 | VPudAagdAudTucgadAuCfaauccaascsa | 1111 | UGUUGGAUUGAUUCGAAAUCUUG | 1437 |
| 1548493.1 | | | | | | |
| AD- | gsgsauugAfuUfCfGfaaaucuugscsa | 773 | VPuGfcadAg(Agn)uuucgaAfuCfaauccsasa | 1112 | UUGGAUUGAUUCGAAAUCUUGCC | 1438 |
| 1548494.1 | | | | | | |
| AD- | gsgsauugauUfCfGfaaaucuugscsa | 774 | VPudGcadAgdAuuucdGaAfucaauccsasa | 1113 | UUGGAUUGAUUCGAAAUCUUGCC | 1438 |
| 1548495.1 | | | | | | |
| AD- | ususgauuCfgAfAfAfucuugcccsusa | 775 | VPuAfggdGc(Agn)agauuuCfgAfaucaasusc | 1114 | GAUUGAUUCGAAAUCUUGCCCUU | 1439 |
| 1548496.1 | | | | | | |
| AD- | asusuccaCfgAfCfUfaguucagususa | 776 | VPuAfacdTg(Agn)acuaguCfgUfggaausgsg | 1115 | CCAUUCCACGACUAGUUCAGUUG | 1440 |
| 1548497.1 | | | | | | |
| AD- | cscsacgacuAfGfUfucaguugcsusa | 777 | VPudAgcdAadCugaadCuAfgucguggsasa | 1116 | UUCCACGACUAGUUCAGUUGCUU | 1441 |
| 1548498.1 | | | | | | |
| AD- | ususcaguugCfUfUfguucgugcsasa | 778 | VPudTgcdAcdGaacadAgCfaacugaascsu | 1117 | AGUUCAGUUGCUUGUUCGUGCAC | 1442 |
| 1548499.1 | | | | | | |
| AD- | gsgsacacagCfAfGfcaauuugusgsa | 779 | VPudCacdAadAuugcdTgCfuguguccscsa | 1118 | UGGGACACAGCAGCAAUUUGUGG | 1443 |
| 1548500.1 | | | | | | |
| AD- | asusccuaGfcUfCfGfggauguucsasa | 780 | VPuUfgadAc(Agn)ucccgaGfcUfaggausgsu | 1119 | ACAUCCUAGCUCGGGAUGUUCAC | 1444 |
| 1548501.1 | | | | | | |
| AD- | asgscucgGfgAfUfGfuucacaacscsa | 781 | VPuGfgudTg(Tgn)gaacauCfcCfgagcusasg | 1120 | CUAGCUCGGGAUGUUCACAACCG | 1445 |
| 1548502.1 | | | | | | |
| AD- | gsasuguucaCfAfAfccgaauugsusa | 782 | VPudAcadAudTeggudTgUfgaacaucscsc | 1121 | GGGAUGUUCACAACCGAAUUGUU | 1446 |
| 1548503.1 | | | | | | |
| AD- | usasucagAfgGfAfCfuaaauaccsasa | 783 | VPuUfggdTa(Tgn)uuagucCfuCfugauasasc | 1122 | GUUAUCAGAGGACUAAAUACCAU | 1447 |
| 1548504.1 | | | | | | |
| AD- | asuscagaGfgAfCfUfaaauaccasusa | 784 | VPuAfugdGu(Agn)uuuaguCfcUfcugausasa | 1123 | UUAUCAGAGGACUAAAUACCAUU | 1448 |
| 1548505.1 | | | | | | |
| AD- | uscsagagGfaCfUfAfaauaccaususa | 785 | VPuAfaudGg(Tgn)auuuagUfcCfucugasusa | 1124 | UAUCAGAGGACUAAAUACCAUUC | 1449 |
| 1548506.1 | | | | | | |
| AD- | gsasggacUfaAfAfUfaccauuccsasa | 786 | VPuUfggdAa(Tgn)gguauuUfaGfuccucsusg | 1125 | CAGAGGACUAAAUACCAUUCCAU | 1450 |
| 1548507.1 | | | | | | |
| AD- | gsasggacuaAfAfUfaccauuccsasa | 787 | VPudTggdAadTgguadTuUfaguccucsusg | 1126 | CAGAGGACUAAAUACCAUUCCAU | 1450 |
| 1548508.1 | | | | | | |
| AD- | gsgsacuaaaUfAfCfcauuccaususa | 788 | VPudAaudGgdAauggdTaUfuuaguccsusc | 1127 | GAGGACUAAAUACCAUUCCAUUG | 451 |
| 1548509.1 | | | | | | |
| AD- | ascsuaaauaCfCfAfuuccauugsusa | 789 | VPudAcadAudGgaaudGgUfauuuaguscsc | 1128 | GGACUAAAUACCAUUCCAUUGUU | 1452 |
| 1548510.1 | | | | | | |
| AD- | csusaaauacCfAfUfuccauugususa | 790 | VPudAacdAadTggaadTgGfuauuuagsusc | 1129 | GACUAAAUACCAUUCCAUUGUUU | 1453 |
| 1548511.1 | | | | | | |
| AD- | usasaauaccAfUfUfccauuguususa | 791 | VPudAaadCadAuggadAuGfguauuuasgsu | 1130 | ACUAAAUACCAUUCCAUUGUUUG | 1454 |
| 1548512.1 | | | | | | |
| AD- | asasauaccaUfUfCfcauuguuusgsa | 792 | VPudCaadAcdAauggdAaUfgguauuusasg | 1131 | CUAAAUACCAUUCCAUUGUUUGU | 1455 |
| 1548513.1 | | | | | | |
| AD- | asasuaccauUfCfCfauuguuugsusa | 793 | VPudAcadAadCaaugdGaAfugguauususa | 1132 | UAAAUACCAUUCCAUUGUUUGUG | 1456 |
| 1548514.1 | | | | | | |
| AD- | asusaccauuCfCfAfuuguuugusgsa | 794 | VPudCacdAadAcaaudGgAfaugguaususu | 1133 | AAAUACCAUUCCAUUGUUUGUGC | 1457 |
| 1548515.1 | | | | | | |
| AD- | asusaccauuCfCfAfuuguuugusgsa | 794 | VPudCacdAadAcaaudGgAfaugguaususu | 1133 | AAAUACCAUUCCAUUGUUUGUGC | 1457 |
| 1548515.2 | | | | | | |
| AD- | usasccauucCfAfUfuguuugugscsa | 795 | VPudGcadCadAacaadTgGfaaugguasusu | 1134 | AAUACCAUUCCAUUGUUUGUGCA | 1458 |
| 1548516.1 | | | | | | |
| AD- | ascscauuccAfUfUfguuugugcsasa | 796 | VPudTgcdAcdAaacadAuGfgaauggusasu | 1135 | AUACCAUUCCAUUGUUUGUGCAG | 1459 |
| 1548517.1 | | | | | | |
| AD- | ascscauuCfcAfUfUfguuugugcsasa | 797 | VPuUfgcdAc(Agn)aacaauGfgAfauggusasu | 1136 | AUACCAUUCCAUUGUUUGUGCAG | 1459 |
| 1548518.1 | | | | | | |
| AD- | cscsauuccaUfUfGfuuugugcasgsa | 798 | VPudCugdCadCaaacdAaUfggaauggsusa | 1137 | UACCAUUCCAUUGUUUGUGCAGC | 1460 |
| 1548519.1 | | | | | | |
| AD- | csasuuccAfuUfGfUfuugugcagscsa | 799 | VPuGfcudGc(Agn)caaacaAfuGfgaaugsgsu | 1138 | ACCAUUCCAUUGUUUGUGCAGCU | 1461 |
| 1548520.1 | | | | | | |
| AD- | uscscauuGfuUfUfGfugcagcugscsa | 800 | VPuGfcadGc(Tgn)gcacaaAfcAfauggasasu | 1139 | AUUCCAUUGUUUGUGCAGCUGCU | 1462 |
| 1548521.1 | | | | | | |
| AD- | gsusuugugcAfGfCfugcuuuaususa | 801 | VPudAaudAadAgcagdCuGfcacaaacsasa | 1140 | UUGUUUGUGCAGCUGCUUUAUUC | 1463 |
| 1548522.1 | | | | | | |
| AD- | csusccucugAfCfAfgaguuacususa | 802 | VPudAagdTadAcucudGuCfagaggagscsu | 1141 | AGCUCCUCUGACAGAGUUACUUC | 1464 |
| 1548523.1 | | | | | | |
| AD- | gsascagaGfuUfAfCfuucacucusasa | 803 | VPuUfagdAg(Tgn)gaaguaAfcUfcugucsasg | 1142 | CUGACAGAGUUACUUCACUCUAG | 1465 |
| 1548524.1 | | | | | | |
| AD- | asgsuuacUfuCfAfCfucuaggaasusa | 804 | VPuAfuudCc(Tgn)agagugAfaGfuaacuscsu | 1143 | AGAGUUACUUCACUCUAGGAAUG | 1466 |
| 1548525.1 | | | | | | |
| AD- | gsasggacAfaGfCfCfacaagauusasa | 805 | VPuUfaadTc(Tgn)uguggcUfuGfuccucsasg | 1144 | CUGAGGACAAGCCACAAGAUUAC | 1467 |
| 1548526.1 | | | | | | |
| AD- | csascaagauUfAfCfaagaaacgsgsa | 806 | VPudCcgdTudTcuugdTaAfucuugugsgsc | 1145 | GCCACAAGAUUACAAGAAACGGC | 1468 |
| 1548527.1 | | | | | | |
| AD- | ascsaagauuAfCfAfagaaacggscsa | 807 | VPudGccdGudTucuudGuAfaucuugusgsg | 1146 | CCACAAGAUUACAAGAAACGGCU | 1469 |
| 1548528.1 | | | | | | |
| AD- | csasagauuaCfAfAfgaaacggcsusa | 808 | VPudAgcdCgdTuucudTgUfaaucuugsusg | 1147 | CACAAGAUUACAAGAAACGGCUU | 1470 |
| 1548529.1 | | | | | | |
| AD- | asasgauuacAfAfGfaaacggcususa | 809 | VPudAagdCcdGuuucdTuGfuaaucuusgsu | 1148 | ACAAGAUUACAAGAAACGGCUUU | 1471 |
| 1548530.1 | | | | | | |
| AD- | ususacaagaAfAfCfggcuuucasgsa | 810 | VPudCugdAadAgccgdTuUfcuuguaasusc | 1149 | GAUUACAAGAAACGGCUUUCAGU | 1472 |
| 1548531.1 | | | | | | |
| AD- | usascaagaaAfCfGfgcuuucagsusa | 811 | VPudAcudGadAagccdGuUfucuuguasasu | 1150 | AUUACAAGAAACGGCUUUCAGUU | 1473 |
| 1548532.1 | | | | | | |
| AD- | asasacggCfuUfUfCfaguugagcsusa | 812 | VPuAfgcdTc(Agn)acugaaAfgCfcguuuscsu | 1151 | AGAAACGGCUUUCAGUUGAGCUG | 1474 |
| 1548533.1 | | | | | | |
| AD- | gscsuuucAfgUfUfGfagcugaccsasa | 813 | VPuUfggdTc(Agn)gcucaaCfuGfaaagescsg | 1152 | CGGCUUUCAGUUGAGCUGACCAG | 1475 |
| 1548534.1 | | | | | | |
| AD- | csusuggacuUfGfAfuauuggugscsa | 814 | VPudGcadCcdAauaudCaAfguccaagsasu | 1153 | AUCUUGGACUUGAUAUUGGUGCC | 1476 |
| 1548535.1 | | | | | | |
| AD- | usasucgcCfaGfGfAfugauccuasgsa | 815 | VPuCfuadGg(Agn)ucauccUfgGfcgauasusc | 1154 | GAUAUCGCCAGGAUGAUCCUAGC | 1477 |
| 1548536.1 | | | | | | |
| AD- | csasccacCfcUfGfGfugcugacusasa | 816 | VPuUfagdTc(Agn)gcaccaGfgGfuggugsgsc | 1155 | GCCACCACCCUGGUGCUGACUAU | 1478 |
| 1548537.1 | | | | | | |
| AD- | asuscagcugGfCfCfugguuugasusa | 817 | VPudAucdAadAccagdGcCfagcugaususg | 1156 | CAAUCAGCUGGCCUGGUUUGAUA | 1479 |
| 1548538.1 | | | | | | |
| AD- | uscsagcuGfgCfCfUfgguuugausasa | 818 | VPuUfaudCa(Agn)accaggCfcAfgcugasusu | 1157 | AAUCAGCUGGCCUGGUUUGAUAC | 1480 |
| 1548539.1 | | | | | | |
| AD- | uscsagcuggCfCfUfgguuugausasa | 819 | VPudTaudCadAaccadGgCfcagcugasusu | 1158 | AAUCAGCUGGCCUGGUUUGAUAC | 1480 |
| 1548540.1 | | | | | | |
| AD- | csusggccUfgGfUfUfugauacugsasa | 820 | VPuUfcadGu(Agn)ucaaacCfaGfgccagscsu | 1159 | AGCUGGCCUGGUUUGAUACUGAC | 1481 |
| 1548541.1 | | | | | | |
| AD- | csusguaaauCfAfUfccuuuaggsusa | 821 | VPudAccdTadAaggadTgAfuuuacagsgsu | 1160 | ACCUGUAAAUCAUCCUUUAGGUA | 1482 |
| 1548542.1 | | | | | | |
| AD- | usgsuaaaucAfUfCfcuuuaggusasa | 822 | VPudTacdCudAaaggdAuGfauuuacasgsg | 1161 | CCUGUAAAUCAUCCUUUAGGUAA | 1483 |
| 1548543.1 | | | | | | |
| AD- | asasagacuuGfGfUfugguagggsusa | 823 | VPudAccdCudAccaadCcAfagucuuuscsu | 1162 | AGAAAGACUUGGUUGGUAGGGUG | 1484 |
| 1548544.1 | | | | | | |
| AD- | ascsuuugAfaAfGfGfagaugucususa | 824 | VPuAfagdAc(Agn)ucuccuUfuCfaaagusasu | 1163 | AUACUUUGAAAGGAGAUGUCUUG | 1485 |
| 1548545.1 | | | | | | |
| AD- | ascsuuugaaAfGfGfagaugucususa | 825 | VPudAagdAcdAucucdCuUfucaaagusasu | 1164 | AUACUUUGAAAGGAGAUGUCUUG | 1485 |
| 1548546.1 | | | | | | |
| AD- | ususcucagaUfUfUfcugguugususa | 826 | VPudAacdAadCcagadAaUfcugagaascsa | 1165 | UGUUCUCAGAUUUCUGGUUGUUA | 1486 |
| 1548547.1 | | | | | | |
| AD- | uscsucagAfuUfUfCfugguuguusasa | 827 | VPuUfaadCa(Agn)ccagaaAfuCfugagasasc | 1166 | GUUCUCAGAUUUCUGGUUGUUAU | 1487 |
| 1548548.1 | | | | | | |
| AD- | uscsucagauUfUfCfugguuguusasa | 828 | VPudTaadCadAccagdAaAfucugagasasc | 1167 | GUUCUCAGAUUUCUGGUUGUUAU | 1487 |
| 1548549.1 | | | | | | |
| AD- | csuscagauuUfCfUfgguuguuasusa | 829 | VPudAuadAcdAaccadGaAfaucugagsasa | 1168 | UUCUCAGAUUUCUGGUUGUUAUG | 1488 |
| 1548550.1 | | | | | | |
| AD- | gsusuguuauGfUfGfaucaugugsusa | 830 | VPudAcadCadTgaucdAcAfuaacaacscsa | 1169 | UGGUUGUUAUGUGAUCAUGUGUG | 1489 |
| 1548551.1 | | | | | | |
| AD- | ususguuaugUfGfAfucaugugusgsa | 831 | VPudCacdAcdAugaudCaCfauaacaascsc | 1170 | GGUUGUUAUGUGAUCAUGUGUGG | 1490 |
| 1548552.1 | | | | | | |
| AD- | gsusgaucAfuGfUfGfuggaaguusasa | 832 | VPuUfaadCu(Tgn)ccacacAfuGfaucacsasu | 1171 | AUGUGAUCAUGUGUGGAAGUUAU | 1491 |
| 1548553.1 | | | | | | |
| AD- | gsasucauguGfUfGfgaaguuaususa | 833 | VPudAaudAadCuuccdAcAfcaugaucsasc | 1172 | GUGAUCAUGUGUGGAAGUUAUUA | 1492 |
| 1548554.1 | | | | | | |
| AD- | asuscaugugUfGfGfaaguuauusasa | 834 | VPudTaadTadAcuucdCaCfacaugauscsa | 1173 | UGAUCAUGUGUGGAAGUUAUUAA | 1493 |
| 1548555.1 | | | | | | |
| AD- | usgscaacuuAfAfUfacucaaausgsa | 835 | VPudCaudTudGaguadTuAfaguugcasasa | 1174 | UUUGCAACUUAAUACUCAAAUGA | 1494 |
| 1548556.1 | | | | | | |
| AD- | cscsuuucUfcUfCfUfuuauacagscsa | 836 | VPuGfcudGu(Agn)uaaagaGfaGfaaaggscsu | 1175 | AGCCUUUCUCUCUUUAUACAGCU | 1495 |
| 1548557.1 | | | | | | |
| AD- | ususuauaCfaGfCfUfguauugucsusa | 837 | VPuAfgadCa(Agn)uacagcUfgUfauaaasgsa | 1176 | UCUUUAUACAGCUGUAUUGUCUG | 1496 |
| 1548558.1 | | | | | | |
| AD- | ususuauacaGfCfUfguauugucsusa | 838 | VPudAgadCadAuacadGcUfguauaaasgsa | 1177 | UCUUUAUACAGCUGUAUUGUCUG | 1496 |
| 1548559.1 | | | | | | |
| AD- | asusugucugAfAfCfuugcauugsusa | 839 | VPudAcadAudGcaagdTuCfagacaausasc | 1178 | GUAUUGUCUGAACUUGCAUUGUG | 1497 |
| 1548560.1 | | | | | | |
| AD- | ususggccUfgUfAfGfaguugcugsasa | 840 | VPuUfcadGc(Agn)acucuaCfaGfgccaasusc | 1179 | GAUUGGCCUGUAGAGUUGCUGAG | 1498 |
| 1548561.1 | | | | | | |
| AD- | asgsugccUfgAfCfAfcacuaaccsasa | 841 | VPuUfggdTu(Agn)guguguCfaGfgcacususu | 1180 | AAAGUGCCUGACACACUAACCAA | 1499 |
| 1548562.1 | | | | | | |
| AD- | csusgacacaCfUfAfaccaagcusgsa | 842 | VPudCagdCudTgguudAgUfgugucagsgsc | 1181 | GCCUGACACACUAACCAAGCUGA | 1500 |
| 1548563.1 | | | | | | |
| AD- | usasaccaagCfUfGfaguuuccusasa | 843 | VPudTagdGadAacucdAgCfuugguuasgsu | 1182 | ACUAACCAAGCUGAGUUUCCUAU | 1501 |
| 1548564.1 | | | | | | |
| AD- | asgscugaGfuUfUfCfcuaugggasasa | 844 | VPuUfucdCc(Agn)uaggaaAfcUfcagcususg | 1183 | CAAGCUGAGUUUCCUAUGGGAAC | 1502 |
| 1548565.1 | | | | | | |
| AD- | ususuccuauGfGfGfaacaauugsasa | 845 | VPudTcadAudTguucdCcAfuaggaaascsu | 1184 | AGUUUCCUAUGGGAACAAUUGAA | 1503 |
| 1548566.1 | | | | | | |
| AD- | gsuscgagGfaGfUfAfacaauacasasa | 846 | VPuUfugdTa(Tgn)uguuacUfcCfucgacscsa | 1185 | UGGUCGAGGAGUAACAAUACAAA | 1504 |
| 1548567.1 | | | | | | |
| AD- | gsuscgaggaGfUfAfacaauacasasa | 847 | VPudTugdTadTuguudAcUfccucgacscsa | 1186 | UGGUCGAGGAGUAACAAUACAAA | 1504 |
| 1548568.1 | | | | | | |
| AD- | asuscaaaCfcCfUfAfgccuugcususa | 848 | VPuAfagdCa(Agn)ggcuagGfgUfuugausasa | 1187 | UUAUCAAACCCUAGCCUUGCUUG | 1505 |
| 1548569.1 | | | | | | |
| AD- | ususugcuUfgCfUfUfugaaguagscsa | 849 | VPuGfcudAc(Tgn)ucaaagCfaAfgcaaasgsu | 1188 | ACUUUGCUUGCUUUGAAGUAGCU | 1506 |
| 1548570.1 | | | | | | |
| AD- | usgscuugCfuUfUfGfaaguagcuscsa | 850 | VPuGfagdCu(Agn)cuucaaAfgCfaagcasasa | 1189 | UUUGCUUGCUUUGAAGUAGCUCU | 1507 |
| 1548571.1 | | | | | | |
| AD- | gscsuugcUfuUfGfAfaguagcucsusa | 851 | VPuAfgadGc(Tgn)acuucaAfaGfcaagcsasa | 1190 | UUGCUUGCUUUGAAGUAGCUCUU | 1508 |
| 1548572.1 | | | | | | |
| AD- | asasgucucuCfGfUfaguguuaasgsa | 852 | VPudCuudAadCacuadCgAfgagacuusasa | 1191 | UUAAGUCUCUCGUAGUGUUAAGU | 1509 |
| 1548573.1 | | | | | | |
| AD- | uscsucucGfuAfGfUfguuaaguusasa | 853 | VPuUfaadCu(Tgn)aacacuAfcGfagagascsu | 1192 | AGUCUCUCGUAGUGUUAAGUUAU | 1510 |
| 1548574.1 | | | | | | |
| AD- | csuscucgUfaGfUfGfuuaaguuasusa | 854 | VPuAfuadAc(Tgn)uaacacUfaCfgagagsasc | 1193 | GUCUCUCGUAGUGUUAAGUUAUA | 1511 |
| 1548575.1 | | | | | | |
| AD- | csuscucguaGfUfGfuuaaguuasusa | 855 | VPudAuadAcdTuaacdAcUfacgagagsasc | 1194 | GUCUCUCGUAGUGUUAAGUUAUA | 1511 |
| 1548576.1 | | | | | | |
| AD- | csuscguaguGfUfUfaaguuauasgsa | 856 | VPudCuadTadAcuuadAcAfcuacgagsasg | 1195 | CUCUCGUAGUGUUAAGUUAUAGU | 1512 |
| 1548577.1 | | | | | | |
| AD- | csgsuaguguUfAfAfguuauagusgsa | 857 | VPudCacdTadTaacudTaAfcacuacgsasg | 1196 | CUCGUAGUGUUAAGUUAUAGUGA | 1513 |
| 1548578.1 | | | | | | |
| AD- | usasguguUfaAfGfUfuauagugasasa | 858 | VPuUfucdAc(Tgn)auaacuUfaAfcacuascsg | 1197 | CGUAGUGUUAAGUUAUAGUGAAU | 1514 |
| 1548579.1 | | | | | | |
| AD- | gsusgaauAfcUfGfCfuacagcaasusa | 859 | VPuAfuudGc(Tgn)guagcaGfuAfuucacsusa | 1198 | UAGUGAAUACUGCUACAGCAAUU | 1515 |
| 1548580.1 | | | | | | |
| AD- | csusgcuacaGfCfAfauuucuaasusa | 860 | VPudAuudAgdAaauudGcUfguagcagsusa | 1199 | UACUGCUACAGCAAUUUCUAAUU | 1516 |
| 1548581.1 | | | | | | |
| AD- | gsasauugAfgUfAfAfugguguagsasa | 861 | VPuUfcudAc(Agn)ccauuaCfuCfaauucsusu | 1200 | AAGAAUUGAGUAAUGGUGUAGAA | 1517 |
| 1548582.1 | | | | | | |
| AD- | ususgaguAfaUfGfGfuguagaacsasa | 862 | VPuUfgudTc(Tgn)acaccaUfuAfcucaasusu | 1201 | AAUUGAGUAAUGGUGUAGAACAC | 1518 |
| 1548583.1 | | | | | | |
| AD- | gsasguaaUfgGfUfGfuagaacacsusa | 863 | VPuAfgudGu(Tgn)cuacacCfaUfuacucsasa | 1202 | UUGAGUAAUGGUGUAGAACACUA | 1519 |
| 1548584.1 | | | | | | |
| AD- | asgsuaauGfgUfGfUfagaacacusasa | 864 | VPuUfagdTg(Tgn)ucuacaCfcAfuuacuscsa | 1203 | UGAGUAAUGGUGUAGAACACUAA | 1520 |
| 1548585.1 | | | | | | |
| AD- | usasauggUfgUfAfGfaacacuaasusa | 865 | VPuAfuudAg(Tgn)guucuaCfaCfcauuascsu | 1204 | AGUAAUGGUGUAGAACACUAAUU | 1521 |
| 1548586.1 | | | | | | |
| AD- | asusgguguaGfAfAfcacuaauuscsa | 866 | VPudGaadTudAgugudTcUfacaccaususa | 1205 | UAAUGGUGUAGAACACUAAUUCA | 1522 |
| 1548587.1 | | | | | | |
| AD- | usgsguguagAfAfCfacuaauucsasa | 867 | VPudTgadAudTagugdTuCfuacaccasusu | 1206 | AAUGGUGUAGAACACUAAUUCAU | 1523 |
| 1548588.1 | | | | | | |
| AD- | gsgsuguagaAfCfAfcuaauucasusa | 868 | VPudAugdAadTuagudGuUfcuacaccsasu | 1207 | AUGGUGUAGAACACUAAUUCAUA | 1524 |
| 1548589.1 | | | | | | |
| AD- | gsusguagAfaCfAfCfuaauucausasa | 869 | VPuUfaudGa(Agn)uuagugUfuCfuacacscsa | 1208 | UGGUGUAGAACACUAAUUCAUAA | 1525 |
| 1548590.1 | | | | | | |
| AD- | usgsuagaAfcAfCfUfaauucauasasa | 870 | VPuUfuadTg(Agn)auuaguGfuUfcuacascsc | 1209 | GGUGUAGAACACUAAUUCAUAAU | 1526 |
| 1548591.1 | | | | | | |
| AD- | gsusagaacaCfUfAfauucauaasusa | 871 | VPudAuudAudGaauudAgUfguucuacsasc | 1210 | GUGUAGAACACUAAUUCAUAAUC | 1527 |
| 1548592.1 | | | | | | |
| AD- | usasgaacacUfAfAfuucauaauscsa | 872 | VPudGaudTadTgaaudTaGfuguucuascsa | 1211 | UGUAGAACACUAAUUCAUAAUCA | 1528 |
| 1548593.1 | | | | | | |
| AD- | asgsaacacuAfAfUfucauaaucsasa | 873 | VPudTgadTudAugaadTuAfguguucusasc | 1212 | GUAGAACACUAAUUCAUAAUCAC | 1529 |
| 1548594.1 | | | | | | |
| AD- | asgsaacaCfuAfAfUfucauaaucsasa | 874 | VPuUfgadTu(Agn)ugaauuAfgUfguucusasc | 1213 | GUAGAACACUAAUUCAUAAUCAC | 1529 |
| 1548595.1 | | | | | | |
| AD- | gsasacacuaAfUfUfcauaaucascsa | 875 | VPudGugdAudTaugadAuUfaguguucsusa | 1214 | UAGAACACUAAUUCAUAAUCACU | 1530 |
| 1548596.1 | | | | | | |
| AD- | asascacuAfaUfUfCfauaaucacsusa | 876 | VPuAfgudGa(Tgn)uaugaaUfuAfguguuscsu | 1215 | AGAACACUAAUUCAUAAUCACUC | 1531 |
| 1548597.1 | | | | | | |
| AD- | asusgguccaAfUfUfaguuuccususa | 877 | VPudAagdGadAacuadAuUfggaccaususu | 1216 | AAAUGGUCCAAUUAGUUUCCUUU | 1532 |
| 1548598.1 | | | | | | |
| AD- | ususugggauAfUfGfuauggguasgsa | 878 | VPudCuadCcdCauacdAuAfucccaaasusa | 1217 | UAUUUGGGAUAUGUAUGGGUAGG | 1533 |
| 1548599.1 | | | | | | |
| AD- | usgsuaugGfgUfAfGfgguaaaucsasa | 879 | VPuUfgadTu(Tgn)acccuaCfcCfauacasusa | 1218 | UAUGUAUGGGUAGGGUAAAUCAG | 1534 |
| 1548600.1 | | | | | | |
| AD- | asusggguAfgGfGfUfaaaucagusasa | 880 | VPuUfacdTg(Agn)uuuaccCfuAfcccausasc | 1219 | GUAUGGGUAGGGUAAAUCAGUAA | 1535 |
| 1548601.1 | | | | | | |
| AD- | gsusaggguaAfAfUfcaguaagasgsa | 881 | VPudCucdTudAcugadTuUfacccuacscsc | 1220 | GGGUAGGGUAAAUCAGUAAGAGG | 1536 |
| 1548602.1 | | | | | | |
| AD- | asgsgguaAfaUfCfAfguaagaggsusa | 882 | VPuAfccdTc(Tgn)uacugaUfuUfacccusasc | 1221 | GUAGGGUAAAUCAGUAAGAGGUG | 1537 |
| 1548603.1 | | | | | | |
| AD- | gsgsguaaauCfAfGfuaagaggusgsa | 883 | VPudCacdCudCuuacdTgAfuuuaccesusa | 1222 | UAGGGUAAAUCAGUAAGAGGUGU | 1538 |
| 1548604.1 | | | | | | |
| AD- | gsusaaaucaGfUfAfagaggugususa | 884 | VPudAacdAcdCucuudAcUfgauuuacscsc | 1223 | GGGUAAAUCAGUAAGAGGUGUUA | 1539 |
| 1548605.1 | | | | | | |
| AD- | asasaucaGfuAfAfGfagguguuasusa | 885 | VPuAfuadAc(Agn)ccucuuAfcUfgauuusasc | 1224 | GUAAAUCAGUAAGAGGUGUUAUU | 1540 |
| 1548606.1 | | | | | | |
| AD- | asasucaguaAfGfAfgguguuaususa | 886 | VPudAaudAadCaccudCuUfacugauususa | 1225 | UAAAUCAGUAAGAGGUGUUAUUU | 1541 |
| 1548607.1 | | | | | | |
| AD- | csasguaagaGfGfUfguuauuugsgsa | 887 | VPudCcadAadTaacadCcUfcuuacugsasu | 1226 | AUCAGUAAGAGGUGUUAUUUGGA | 1542 |
| 1548608.1 | | | | | | |
| AD- | ususggacAfuGfGfCfcauggaacscsa | 888 | VPuGfgudTc(C2p)auggccAfuGfuccaascsu | 1227 | AGUUGGACAUGGCCAUGGAACCA | 1543 |
| 1548609.1 | | | | | | |
| AD- | usgsgacuCfuGfGfAfauccauucsusa | 889 | VPuAfgadAu(G2p)gauuccAfgAfguccasgsg | 1228 | CCUGGACUCUGGAAUCCAUUCUG | 1544 |
| 1548610.1 | | | | | | |
| AD- | csuscugaGfuGfGfUfaaaggcaasusa | 890 | VPuAfuudGc(C2p)uuuaccAfcUfcagagsasa | 1229 | UUCUCUGAGUGGUAAAGGCAAUC | 1545 |
| 1548611.1 | | | | | | |
| AD- | uscsaagaAfcAfAfGfuagcugausasa | 891 | VPuUfaudCa(G2p)cuacuuGfuUfcuugasgsu | 1230 | ACUCAAGAACAAGUAGCUGAUAU | 1546 |
| 1548612.1 | | | | | | |
| AD- | usasgcugAfuAfUfUfgauggacasgsa | 892 | VPuCfugdTc(C2p)aucaauAfuCfagcuascsu | 1231 | AGUAGCUGAUAUUGAUGGACAGU | 1547 |
| 1548613.1 | | | | | | |
| AD- | asgscugaUfaUfUfGfauggacagsusa | 893 | VPuAfcudGu(C2p)caucaaUfaUfcagcusasc | 1232 | GUAGCUGAUAUUGAUGGACAGUA | 1548 |
| 1548614.1 | | | | | | |
| AD- | csusgauaUfuGfAfUfggacaguasusa | 894 | VPuAfuadCu(G2p)uccaucAfaUfaucagscsu | 1233 | AGCUGAUAUUGAUGGACAGUAUG | 1549 |
| 1548615.1 | | | | | | |
| AD- | usgsauggAfcAfGfUfaugcaaugsasa | 895 | VPuUfcadTu(G2p)cauacuGfuCfcaucasasu | 1234 | AUUGAUGGACAGUAUGCAAUGAC | 1550 |
| 1548616.1 | | | | | | |
| AD- | asgsuaugCfaAfUfGfacucgagcsusa | 896 | VPuAfgcdTc(G2p)agucauUfgCfauacusgsu | 1235 | ACAGUAUGCAAUGACUCGAGCUC | 1339 |
| 1548617.1 | | | | | | |
| AD- | asgscucaGfaGfGfGfuacgagcusgsa | 897 | VPuCfagdCu(C2p)guacccUfcUfgagcuscsg | 1236 | CGAGCUCAGAGGGUACGAGCUGC | 1551 |
| 1548618.1 | | | | | | |
| AD- | csuscagaGfgGfUfAfcgagcugcsusa | 898 | VPuAfgcdAg(C2p)ucguacCfcUfcugagscsu | 1237 | AGCUCAGAGGGUACGAGCUGCUA | 1552 |
| 1548619.1 | | | | | | |
| AD- | asgsagggUfaCfGfAfgcugcuausgsa | 899 | VPuCfaudAg(C2p)agcucgUfaCfccucusgsa | 1238 | UCAGAGGGUACGAGCUGCUAUGU | 1553 |
| 1548620.1 | | | | | | |
| AD- | gscsuaugUfuCfCfCfugagacaususa | 900 | VPuAfaudGu(C2p)ucagggAfaCfauagcsasg | 1239 | CUGCUAUGUUCCCUGAGACAUUA | 1554 |
| 1548621.1 | | | | | | |
| AD- | asgscguuUfgGfCfUfgaaccaucsasa | 901 | VPuUfgadTg(G2p)uucagcCfaAfacgcusgsg | 1240 | CCAGCGUUUGGCUGAACCAUCAC | 1555 |
| 1548622.1 | | | | | | |
| AD- | usgscugaAfaCfAfUfgcaguugusasa | 902 | VPuUfacdAa(C2p)ugcaugUfuUfcagcasusc | 1241 | GAUGCUGAAACAUGCAGUUGUAA | 1556 |
| 1548623.1 | | | | | | |
| AD- | csasugcaGfuUfGfUfaaacuugasusa | 903 | VPuAfucdAa(G2p)uuuacaAfcUfgcaugsusu | 1242 | AACAUGCAGUUGUAAACUUGAUU | 1557 |
| 1548624.1 | | | | | | |
| AD- | gscsaguuGfuAfAfAfcuugauuasasa | 904 | VPuUfuadAu(C2p)aaguuuAfcAfacugcsasu | 1243 | AUGCAGUUGUAAACUUGAUUAAC | 1558 |
| 1548625.1 | | | | | | |
| AD- | usgsauuaAfcUfAfUfcaagaugasusa | 905 | VPuAfucdAu(C2p)uugauaGfuUfaaucasasg | 1244 | CUUGAUUAACUAUCAAGAUGAUG | 1559 |
| 1548626.1 | | | | | | |
| AD- | csasgaacUfuGfCfCfacacgugcsasa | 906 | VPuUfgcdAc(G2p)uguggcAfaGfuucugscsa | 1245 | UGCAGAACUUGCCACACGUGCAA | 1560 |
| 1548627.1 | | | | | | |
| AD- | csascacgUfgCfAfAfucccugaascsa | 907 | VPuGfuudCa(G2p)ggauugCfaCfgugugsgsc | 1246 | GCCACACGUGCAAUCCCUGAACU | 1561 |
| 1548628.1 | | | | | | |
| AD- | gsusgcaaUfcCfCfUfgaacugacsasa | 908 | VPuUfgudCa(G2p)uucaggGfaUfugcacsgsu | 1247 | ACGUGCAAUCCCUGAACUGACAA | 1562 |
| 1548629.1 | | | | | | |
| AD- | gsasggacCfaGfGfUfggugguuasasa | 909 | VPuUfuadAc(C2p)accaccUfgGfuccucsgsu | 1248 | ACGAGGACCAGGUGGUGGUUAAU | 1563 |
| 1548630.1 | | | | | | |
| AD- | gsusggugGfuUfAfAfuaaggcugscsa | 910 | VPuGfcadGc(C2p)uuauuaAfcCfaccacscsu | 1249 | AGGUGGUGGUUAAUAAGGCUGCA | 1564 |
| 1548631. | | | | | | |
| AD- | usgscagaAfuAfCfAfaaugaugusasa | 911 | VPuUfacdAu(C2p)auuuguAfuUfcugcasusg | 1250 | CAUGCAGAAUACAAAUGAUGUAG | 1565 |
| 1548632.1 | | | | | | |
| AD- | asgsaauaCfaAfAfUfgauguagasasa | 912 | VPuUfucdTa(C2p)aucauuUfgUfauucusgsc | 1251 | GCAGAAUACAAAUGAUGUAGAAA | 1566 |
| 1548633.1 | | | | | | |
| AD- | usgsauguAfgAfAfAfcagcucgususa | 913 | VPuAfacdGa(G2p)cuguuuCfuAfcaucasusu | 1252 | AAUGAUGUAGAAACAGCUCGUUG | 1369 |
| 1548634.1 | | | | | | |
| AD- | csusugcaUfaAfCfCfuuucccauscsa | 914 | VPuGfaudGg(G2p)aaagguUfaUfgcaagsgsu | 1253 | ACCUUGCAUAACCUUUCCCAUCA | 1567 |
| 1548635.1 | | | | | | |
| AD- | ususgcauAfaCfCfUfuucccaucsasa | 915 | VPuUfgadTg(G2p)gaaaggUfuAfugcaasgsg | 1254 | CCUUGCAUAACCUUUCCCAUCAU | 1568 |
| 1548636.1 | | | | | | |
| AD- | cscsaucuUfuAfAfGfucuggaggscsa | 916 | VPuGfccdTc(C2p)agacuuAfaAfgauggscsc | 1255 | | 1569 |
| 1548637.1 | | | | | GGCCAUCUUUAAGUCUGGAGGCA | |
| AD- | gscscauuAfcAfAfCfucuccacasasa | 917 | VPuUfugdTg(G2p)agaguuGfuAfauggcsasu | 1256 | AUGCCAUUACAACUCUCCACAAC | 1570 |
| 1548638.1 | | | | | | |
| AD- | gsusugccUfuGfCfUfcaacaaaascsa | 918 | VPuGfuudTu(G2p)uugagcAfaGfgcaacscsa | 1257 | UGGUUGCCUUGCUCAACAAAACA | 1571 |
| 1548639.1 | | | | | | |
| AD- | asusucuuGfgCfUfAfuuacgacasgsa | 919 | VPuCfugdTc(G2p)uaauagCfcAfagaaususu | 1258 | AAAUUCUUGGCUAUUACGACAGA | 1383 |
| 1548640.1 | | | | | | |
| AD- | asasauauAfaUfGfAfggaccuausasa | 920 | VPuUfaudAg(G2p)uccucaUfuAfuauuusasc | 1259 | GUAAAUAUAAUGAGGACCUAUAC | 1572 |
| 1548641.1 | | | | | | |
| AD- | asasuauaAfuGfAfGfgaccuauascsa | 921 | VPuGfuadTa(G2p)guccucAfuUfauauususa | 1260 | UAAAUAUAAUGAGGACCUAUACU | 1573 |
| 1548642.1 | | | | | | |
| AD- | gscsagagUfgCfUfGfaaggugcusasa | 922 | VPuUfagdCa(C2p)cuucagCfaCfucugcsusu | 1261 | AAGCAGAGUGCUGAAGGUGCUAU | 1574 |
| 1548643.1 | | | | | | |
| AD- | ususcuggGfuUfCfAfgaugauausasa | 923 | VPuUfaudAu(C2p)aucugaAfcCfcagaasgsc | 1262 | GCUUCUGGGUUCAGAUGAUAUAA | 1575 |
| 1548644.1 | | | | | | |
| AD- | gsasugauAfuAfAfAfuguggucascsa | 924 | VPuGfugdAc(C2p)acauuuAfuAfucaucsusg | 1263 | CAGAUGAUAUAAAUGUGGUCACC | 1576 |
| 1548645.1 | | | | | | |
| AD- | gsgsaauuCfuUfUfCfuaaccucascsa | 925 | VPuGfugdAg(G2p)uuagaaAfgAfauuccsasg | 1264 | CUGGAAUUCUUUCUAACCUCACU | 1577 |
| 1548646.1 | | | | | | |
| AD- | uscsuuucUfaAfCfCfucacuugcsasa | 926 | VPuUfgcdAa(G2p)ugagguUfaGfaaagasasu | 1265 | AUUCUUUCUAACCUCACUUGCAA | 1578 |
| 1548647.1 | | | | | | |
| AD- | ususcuaaCfcUfCfAfcuugcaausasa | 927 | VPuUfaudTg(C2p)aagugaGfgUfuagaasasg | 1266 | CUUUCUAACCUCACUUGCAAUAA | 1579 |
| 1548648.1 | | | | | | |
| AD- | uscsuaacCfuCfAfCfuugcaauasasa | 928 | VPuUfuadTu(G2p)caagugAfgGfuuagasasa | 1267 | UUUCUAACCUCACUUGCAAUAAU | 1580 |
| 1548649.1 | | | | | | |
| AD- | asasguggGfuGfGfUfauagaggcsusa | 929 | VPuAfgcdCu(C2p)uauaccAfcCfcacuusgsg | 1268 | CCAAGUGGGUGGUAUAGAGGCUC | 1581 |
| 1548650.1 | | | | | | |
| AD- | usgsggugGfuAfUfAfgaggcucususa | 930 | VPuAfagdAg(C2p)cucuauAfcCfacccascsu | 1269 | AGUGGGUGGUAUAGAGGCUCUUG | 1582 |
| 1548651.1 | | | | | | |
| AD- | asgsccugCfcAfUfCfugugcucususa | 931 | VPuAfagdAg(C2p)acagauGfgCfaggcuscsa | 1270 | UGAGCCUGCCAUCUGUGCUCUUC | 1583 |
| 1548652.1 | | | | | | |
| AD- | gscscugcCfaUfCfUfgugcucuuscsa | 932 | VPuGfaadGa(G2p)cacagaUfgGfcaggcsusc | 1271 | GAGCCUGCCAUCUGUGCUCUUCG | 1584 |
| 1548653.1 | | | | | | |
| AD- | csasucugUfgCfUfCfuucgucauscsa | 933 | VPuGfaudGa(C2p)gaagagCfaCfagaugsgsc | 1272 | GCCAUCUGUGCUCUUCGUCAUCU | 1585 |
| 1548654.1 | | | | | | |
| AD- | gscsucuuCfgUfCfAfucugaccasgsa | 934 | VPuCfugdGu(C2p)agaugaCfgAfagagcsasc | 1273 | GUGCUCUUCGUCAUCUGACCAGC | 1586 |
| 1548655.1 | | | | | | |
| AD- | asusgcagUfuCfGfCfcuucacuasusa | 935 | VPuAfuadGu(G2p)aaggcgAfaCfugcaususc | 1274 | GAAUGCAGUUCGCCUUCACUAUG | 1587 |
| 1548656.1 | | | | | | |
| AD- | usgsguuaAfgCfUfCfuuacacccsasa | 936 | VPuUfggdGu(G2p)uaagagCfuUfaaccascsa | 1275 | UGUGGUUAAGCUCUUACACCCAC | 1588 |
| 1548657.1 | | | | | | |
| AD- | csusguugGfaUfUfGfauucgaaasusa | 937 | VPuAfuudTc(G2p)aaucaaUfcCfaacagsusa | 1276 | UACUGUUGGAUUGAUUCGAAAUC | 1435 |
| 1548658.1 | | | | | | |
| AD- | usgsuuggAfuUfGfAfuucgaaauscsa | 938 | VPuGfaudTu(C2p)gaaucaAfuCfcaacasgsu | 1277 | ACUGUUGGAUUGAUUCGAAAUCU | 1589 |
| 1548659.1 | | | | | | |
| AD- | csgsugagCfaGfGfGfugccauucscsa | 939 | VPuGfgadAu(G2p)gcacccUfgCfucacgscsa | 1278 | UGCGUGAGCAGGGUGCCAUUCCA | 1590 |
| 1548660.1 | | | | | | |
| AD- | cscsacgaCfuAfGfUfucaguugcsusa | 940 | VPuAfgcdAa(C2p)ugaacuAfgUfcguggsasa | 1279 | UUCCACGACUAGUUCAGUUGCUU | 1441 |
| 1548661.1 | | | | | | |
| AD- | ususcaguUfgCfUfUfguucgugcsasa | 941 | VPuUfgcdAc(G2p)aacaagCfaAfcugaascsu | 1280 | AGUUCAGUUGCUUGUUCGUGCAC | 1442 |
| 1548662.1 | | | | | | |
| AD- | uscsaguuGfcUfUfGfuucgugcascsa | 942 | VPuGfugdCa(C2p)gaacaaGfcAfacugasasc | 1281 | GUUCAGUUGCUUGUUCGUGCACA | 1591 |
| 1548663.1 | | | | | | |
| AD- | asgsuugcUfuGfUfUfcgugcacasusa | 943 | VPuAfugdTg(C2p)acgaacAfaGfcaacusgsa | 1282 | UCAGUUGCUUGUUCGUGCACAUC | 1592 |
| 1548664.1 | | | | | | |
| AD- | csasgaggAfcUfAfAfauaccauuscsa | 944 | VPuGfaadTg(G2p)uauuuaGfuCfcucugsasu | 1283 | AUCAGAGGACUAAAUACCAUUCC | 1593 |
| 1548665.1 | | | | | | |
| AD- | gsascuaaAfuAfCfCfauuccauusgsa | 945 | VPuCfaadTg(G2p)aaugguAfuUfuagucscsu | 1284 | AGGACUAAAUACCAUUCCAUUGU | 1594 |
| 1548666.1 | | | | | | |
| AD- | cscsauucCfaUfUfGfuuugugcasgsa | 946 | VPuCfugdCa(C2p)aaacaaUfgGfaauggsusa | 1285 | UACCAUUCCAUUGUUUGUGCAGC | 1460 |
| 1548667.1 | | | | | | |
| AD- | asusuccaUfuGfUfUfugugcagcsusa | 947 | VPuAfgcdTg(C2p)acaaacAfaUfggaausgsg | 1286 | CCAUUCCAUUGUUUGUGCAGCUG | 1595 |
| 1548668.1 | | | | | | |
| AD- | ususccauUfgUfUfUfgugcagcusgsa | 948 | VPuCfagdCu(G2p)cacaaaCfaAfuggaasusg | 1287 | CAUUCCAUUGUUUGUGCAGCUGC | 1596 |
| 1548669.1 | | | | | | |
| AD- | cscsauugUfuUfGfUfgcagcugcsusa | 949 | VPuAfgcdAg(C2p)ugcacaAfaCfaauggsasa | 1288 | UUCCAUUGUUUGUGCAGCUGCUU | 1597 |
| 1548670.1 | | | | | | |
| AD- | gscscacaGfcUfCfCfucugacagsasa | 950 | VPuUfcudGu(C2p)agaggaGfcUfguggcsusc | 1289 | GAGCCACAGCUCCUCUGACAGAG | 1598 |
| 1548671.1 | | | | | | |
| AD- | asasgccaCfaAfGfAfuuacaagasasa | 951 | VPuUfucdTu(G2p)uaaucuUfgUfggcuusgsu | 1290 | ACAAGCCACAAGAUUACAAGAAA | 1599 |
| 1548672.1 | | | | | | |
| AD- | cscsacaaGfaUfUfAfcaagaaacsgsa | 952 | VPuCfgudTu(C2p)uuguaaUfcUfuguggscsu | 1291 | AGCCACAAGAUUACAAGAAACGG | 1600 |
| 1548673.1 | | | | | | |
| AD- | asasgauuAfcAfAfGfaaacggcususa | 953 | VPuAfagdCc(G2p)uuucuuGfuAfaucuusgsu | 1292 | ACAAGAUUACAAGAAACGGCUUU | 1471 |
| 1548674.1 | | | | | | |
| AD- | asusuacaAfgAfAfAfcggcuuucsasa | 954 | VPuUfgadAa(G2p)ccguuuCfuUfguaauscsu | 1293 | AGAUUACAAGAAACGGCUUUCAG | 1601 |
| 1548675.1 | | | | | | |
| AD- | gsgscuuuCfaGfUfUfgagcugacscsa | 955 | VPuGfgudCa(G2p)cucaacUfgAfaagccsgsu | 1294 | ACGGCUUUCAGUUGAGCUGACCA | 1602 |
| 1548676.1 | | | | | | |
| AD- | usgsagcuGfaCfCfAfgcucucucsusa | 956 | VPuAfgadGa(G2p)agcuggUfcAfgcucasasc | 1295 | GUUGAGCUGACCAGCUCUCUCUU | 1603 |
| 1548677.1 | | | | | | |
| AD- | gsasgccaAfuGfGfCfuuggaaugsasa | 957 | VPuUfcadTu(C2p)caagccAfuUfggcucsusg | 1296 | CAGAGCCAAUGGCUUGGAAUGAG | 1604 |
| 1548678.1 | | | | | | |
| AD- | csusgaucUfuGfGfAfcuugauaususa | 958 | VPuAfaudAu(C2p)aaguccAfaGfaucagscsa | 1297 | UGCUGAUCUUGGACUUGAUAUUG | 1605 |
| 1548679.1 | | | | | | |
| AD- | usgsguuuGfaUfAfCfugaccugusasa | 959 | VPuUfacdAg(G2p)ucaguaUfcAfaaccasgsg | 1298 | CCUGGUUUGAUACUGACCUGUAA | 1606 |
| 1548680.1 | | | | | | |
| AD- | ususugauAfcUfGfAfccuguaaasusa | 960 | VPuAfuudTa(C2p)aggucaGfuAfucaaascsc | 1299 | GGUUUGAUACUGACCUGUAAAUC | 1607 |
| 1548681.1 | | | | | | |
| AD- | gsgscuauUfuGfUfAfaaucugccsasa | 961 | VPuUfggdCa(G2p)auuuacAfaAfuagccsusa | 1300 | UAGGCUAUUUGUAAAUCUGCCAC | 1608 |
| 1548682.1 | | | | | | |
| AD- | ususucugGfuUfGfUfuaugugauscsa | 962 | VPuGfaudCa(C2p)auaacaAfcCfagaaasusc | 1301 | GAUUUCUGGUUGUUAUGUGAUCA | 1609 |
| 1548683.1 | | | | | | |
| AD- | gsasucauGfuGfUfGfgaaguuaususa | 963 | VPuAfaudAa(C2p)uuccacAfcAfugaucsasc | 1302 | GUGAUCAUGUGUGGAAGUUAUUA | 1492 |
| 1548684.1 | | | | | | |
| AD- | usasauacUfcAfAfAfugaguaacsasa | 964 | VPuUfgudTa(C2p)ucauuuGfaGfuauuasasg | 1303 | CUUAAUACUCAAAUGAGUAACAU | 1610 |
| 1548685.1 | | | | | | |
| AD- | asusugucUfgAfAfCfuugcauugsusa | 965 | VPuAfcadAu(G2p)caaguuCfaGfacaausasc | 1304 | GUAUUGUCUGAACUUGCAUUGUG | 1497 |
| 1548686.1 | | | | | | |
| AD- | csasgaaaGfuGfCfCfugacacacsusa | 966 | VPuAfgudGu(G2p)ucaggcAfcUfuucugsasg | 1305 | CUCAGAAAGUGCCUGACACACUA | 1611 |
| 1548687.1 | | | | | | |
| AD- | gsasaaguGfcCfUfGfacacacuasasa | 967 | VPuUfuadGu(G2p)ugucagGfcAfcuuucsusg | 1306 | CAGAAAGUGCCUGACACACUAAC | 1612 |
| 1548688.1 | | | | | | |
| AD- | gscscugaCfaCfAfCfuaaccaagscsa | 968 | VPuGfcudTg(G2p)uuagugUfgUfcaggcsasc | 1307 | GUGCCUGACACACUAACCAAGCU | 1613 |
| 1548689.1 | | | | | | |
| AD- | usgsggaaCfaAfUfUfgaaguaaascsa | 969 | VPuGfuudTa(C2p)uucaauUfgUfucccasusa | 1308 | UAUGGGAACAAUUGAAGUAAACU | 1614 |
| 1548690.1 | | | | | | |
| AD- | asusggauCfaCfAfAfgauggaaususa | 970 | VPuAfaudTc(C2p)aucuugUfgAfuccaususc | 1309 | GAAUGGAUCACAAGAUGGAAUUU | 1615 |
| 1548691.1 | | | | | | |
| AD- | ususuaucAfaAfCfCfcuagccuusgsa | 971 | VPuCfaadGg(C2p)uaggguUfuGfauaaasusu | 1310 | AAUUUAUCAAACCCUAGCCUUGC | 1616 |
| 1548692.1 | | | | | | |
| AD- | usasucugUfaAfUfGfguacugacsusa | 972 | VPuAfgudCa(G2p)uaccauUfaCfagauasusu | 1311 | AAUAUCUGUAAUGGUACUGACUU | 1617 |
| 1548693.1 | | | | | | |
| AD- | ususgcuuGfcUfUfUfgaaguagcsusa | 973 | VPuAfgcdTa(C2p)uucaaaGfcAfagcaasasg | 1312 | CUUUGCUUGCUUUGAAGUAGCUC | 1618 |
| 1548694.1 | | | | | | |
| AD- | asgsuguuAfaGfUfUfauagugaasusa | 974 | VPuAfuudCa(C2p)uauaacUfuAfacacusasc | 1313 | GUAGUGUUAAGUUAUAGUGAAUA | 1619 |
| 1548695.1 | | | | | | |
| AD- | usgsuuaaGfuUfAfUfagugaauascsa | 975 | VPuGfuadTu(C2p)acuauaAfcUfuaacascsu | 1314 | AGUGUUAAGUUAUAGUGAAUACU | 1620 |
| 1548696.1 | | | | | | |
| AD- | gsusaaugGfuGfUfAfgaacacuasasa | 976 | VPuUfuadGu(G2p)uucuacAfcCfauuacsusc | 1315 | GAGUAAUGGUGUAGAACACUAAU | 1621 |
| 1548697.1 | | | | | | |
| AD- | asasugguGfuAfGfAfacacuaaususa | 977 | VPuAfaudTa(G2p)uguucuAfcAfccauusasc | 1316 | GUAAUGGUGUAGAACACUAAUUC | 1622 |
| 1548698.1 | | | | | | |
| AD- | csusaauuCfaUfAfAfucacucuasasa | 978 | VPuUfuadGa(G2p)ugauuaUfgAfauuagsusg | 1317 | CACUAAUUCAUAAUCACUCUAAU | 1623 |
| 1548699.1 | | | | | | |
| AD- | ususugggAfuAfUfGfuauggguasgsa | 979 | VPuCfuadCc(C2p)auacauAfuCfccaaasusa | 1318 | UAUUUGGGAUAUGUAUGGGUAGG | 1533 |
| 1548700.1 | | | | | | |
| AD- | gsgsguaaAfuCfAfGfuaagaggusgsa | 980 | VPuCfacdCu(C2p)uuacugAfuUfuacccsusa | 1319 | UAGGGUAAAUCAGUAAGAGGUGU | 1538 |
| 1548701.1 | | | | | | |
| AD- | gsusaaauCfaGfUfAfagaggugususa | 981 | VPuAfacdAc(C2p)ucuuacUfgAfuuuacscsc | 1320 | GGGUAAAUCAGUAAGAGGUGUUA | 1539 |
| 1548702.1 | | | | | | |
| AD- | usasaaucAfgUfAfAfgagguguusasa | 982 | VPuUfaadCa(C2p)cucuuaCfuGfauuuascsc | 1321 | GGUAAAUCAGUAAGAGGUGUUAU | 1624 |
| 1548703.1 | | | | | | |
| AD- | asasucagUfaAfGfAfgguguuaususa | 983 | VPuAfaudAa(C2p)accucuUfaCfugauususa | 1322 | UAAAUCAGUAAGAGGUGUUAUUU | 1541 |
| 1548704.1 | | | | | | |

TABLE 4
Single Dose Screens in Hep3b Cells

| | 10 nM | | 1 nM | | 0.1 nM | |
|---|---|---|---|---|---|---|
| | % of | | % of | | % of | |
| | Message | ST | Message | ST | Message | ST |
| Duplex | Remaining | DEV | Remaining | DEV | Remaining | DEV |
| AD-1548396.1 | 6.38 | 1.03 | 8.14 | 0.85 | 7.67 | 0.28 |
| AD-1548453.1 | 7.45 | 0.60 | 8.67 | 0.85 | 8.67 | 1.01 |
| AD-1548515.1 | 6.52 | 0.20 | 8.04 | 1.05 | 13.41 | 1.52 |
| AD-1548392.1 | 7.49 | 0.99 | 8.81 | 0.97 | 8.79 | 1.23 |
| AD-1548503.1 | 5.63 | 0.33 | 6.74 | 0.42 | 9.09 | 1.34 |
| AD-1548426.1 | 6.57 | 0.29 | 9.69 | 1.48 | 9.30 | 0.62 |
| AD-1548440.1 | 9.93 | 1.75 | 10.55 | 0.90 | 9.50 | 0.33 |
| AD-1548487.1 | 3.41 | 0.36 | 5.58 | 0.39 | 9.73 | 0.65 |
| AD-1548513.1 | 6.68 | 0.55 | 10.00 | 1.36 | 13.85 | 1.46 |
| AD-1548516.1 | 7.28 | 0.80 | 10.11 | 0.56 | 19.31 | 1.98 |
| AD-1548404.1 | 10.39 | 0.55 | 11.08 | 1.12 | 10.02 | 0.97 |
| AD-1548471.1 | 6.96 | 0.44 | 11.22 | 1.12 | 14.67 | 1.32 |
| AD-1548512.1 | 8.02 | 0.18 | 10.54 | 1.63 | 16.98 | 1.85 |
| AD-1548511.1 | 6.66 | 0.68 | 8.59 | 0.09 | 15.71 | 2.44 |
| AD-1548414.1 | 14.20 | 1.19 | 14.68 | 1.56 | 13.32 | 1.68 |
| AD-1548393.1 | 7.67 | 0.71 | 9.02 | 0.41 | 10.19 | 0.68 |
| AD-1548672.1 | 6.39 | 0.31 | 7.62 | 0.80 | 10.46 | 1.71 |
| AD-1548408.1 | 9.44 | 1.32 | 11.92 | 0.84 | 10.66 | 0.65 |
| AD-1548372.1 | 9.55 | 1.53 | 12.01 | 0.64 | 10.04 | 1.96 |
| AD-1548459.1 | 5.18 | 0.60 | 9.67 | 1.51 | 12.19 | 0.56 |
| AD-1548488.1 | 3.62 | 0.46 | 8.29 | 1.49 | 10.67 | 1.06 |
| AD-1548450.1 | 7.29 | 1.92 | 9.29 | 1.12 | 10.88 | 1.02 |
| AD-1548419.1 | 9.67 | 1.28 | 10.25 | 1.16 | 10.88 | 1.07 |
| AD-1548442.1 | 8.85 | 1.52 | 12.38 | 1.81 | 10.94 | 2.21 |
| AD-1548397.1 | 7.99 | 0.70 | 11.90 | 1.06 | 10.98 | 0.95 |
| AD-1548371.1 | 13.85 | 1.90 | 12.69 | 0.88 | 11.73 | 2.51 |
| AD-1548416.1 | 10.39 | 0.46 | 10.76 | 0.71 | 13.19 | 1.85 |
| AD-1548413.1 | 10.47 | 0.91 | 12.09 | 0.88 | 10.85 | 0.79 |
| AD-1548458.1 | 6.58 | 0.54 | 9.68 | 0.55 | 12.90 | 2.99 |
| AD-1548375.1 | 7.69 | 0.87 | 11.20 | 1.02 | 11.89 | 1.60 |
| AD-1548612.1 | 11.49 | 1.89 | 15.86 | 0.60 | 11.90 | 4.52 |
| AD-1548378.1 | 9.35 | 1.53 | 9.44 | 0.76 | 11.98 | 1.88 |
| AD-1548438.1 | 11.23 | 0.85 | 12.12 | 1.18 | 12.01 | 1.26 |
| AD-1548407.1 | 9.40 | 1.08 | 11.16 | 0.68 | 12.06 | 0.22 |
| AD-1548627.1 | 9.40 | 1.33 | 12.63 | 2.23 | 12.18 | 4.01 |
| AD-1548374.1 | 11.24 | 1.10 | 12.55 | 0.65 | 12.19 | 1.35 |
| AD-1548384.1 | 12.70 | 1.74 | 13.02 | 0.75 | 12.21 | 1.36 |
| AD-1548452.1 | 12.80 | 1.34 | 11.34 | 0.47 | 12.28 | 0.89 |
| AD-1548456.1 | 5.17 | 0.70 | 7.42 | 2.27 | 11.28 | 2.45 |
| AD-1548441.1 | 8.35 | 1.39 | 11.01 | 1.49 | 12.35 | 1.24 |
| AD-1548457.1 | 5.68 | 0.27 | 6.23 | 1.71 | 11.24 | 3.32 |
| AD-1548510.1 | 6.38 | 0.21 | 7.57 | 0.58 | 11.50 | 0.23 |
| AD-1548486.1 | 5.65 | 0.50 | 9.61 | 2.34 | 20.32 | 0.74 |
| AD-1548379.1 | 15.88 | 2.14 | 14.66 | 1.39 | 12.56 | 1.6 |
| AD-1548460.1 | 4.93 | 0.41 | 7.78 | 0.95 | 12.74 | 1.35 |
| AD-1548420.1 | 10.96 | 1.03 | 12.19 | 0.77 | 12.82 | 0.92 |
| AD-1548367.1 | 9.70 | 1.48 | 9.48 | 1.53 | 12.87 | 2.76 |
| AD-1548385.1 | 13.75 | 0.39 | 12.75 | 1.83 | 12.88 | 2.32 |
| AD-1548444.1 | 9.02 | 2.60 | 11.81 | 0.97 | 12.99 | 2.01 |
| AD-1548649.1 | 4.50 | 0.55 | 8.05 | 1.03 | 13.24 | 1.43 |
| AD-1548530.1 | 4.98 | 0.39 | 6.79 | 0.69 | 13.34 | 1.48 |
| AD-1548412.1 | 11.99 | 2.06 | 12.72 | 0.64 | 13.36 | 0.53 |
| AD-1548634.1 | 7.14 | 1.01 | 8.32 | 1.00 | 13.42 | 2.35 |
| AD-1548489.1 | 4.83 | 0.68 | 8.46 | 1.23 | 13.56 | 2.12 |
| AD-1548515.2 | 6.37 | 0.93 | 6.60 | 0.40 | 13.65 | 1.03 |
| AD-1548647.1 | 4.83 | 0.46 | 5.58 | 0.60 | 13.72 | 1.92 |
| AD-1548434.1 | 8.56 | 1.46 | 10.73 | 0.82 | 13.80 | 1.17 |
| AD-1548636.1 | 8.56 | 0.90 | 7.90 | 0.63 | 14.00 | 2.14 |
| AD-1548373.1 | 9.78 | 1.54 | 12.36 | 1.29 | 14.09 | 2.93 |
| AD-1548462.1 | 6.93 | 0.64 | 7.82 | 0.54 | 14.19 | 1.42 |
| AD-1548493.1 | 6.44 | 0.54 | 7.75 | 1.04 | 14.36 | 2.94 |
| AD-1548380.1 | 12.76 | 2.64 | 12.82 | 3.47 | 14.70 | 1.39 |
| AD-1548661.1 | 5.76 | 0.49 | 8.06 | 1.18 | 14.74 | 5.30 |
| AD-1548646.1 | 6.74 | 0.66 | 8.04 | 0.56 | 15.03 | 2.10 |
| AD-1548628.1 | 11.04 | 0.92 | 13.58 | 1.76 | 15.18 | 0.54 |
| AD-1548568.1 | 9.90 | 0.86 | 13.13 | 0.54 | 15.29 | 1.19 |
| AD-1548656.1 | 7.95 | 0.91 | 11.71 | 2.24 | 15.67 | 2.39 |
| AD-1548389.1 | 11.48 | 0.95 | 13.50 | 2.69 | 15.77 | 1.34 |
| AD-1548498.1 | 4.87 | 0.76 | 10.24 | 0.99 | 15.86 | 2.71 |
| AD-1548654.1 | 14.94 | 0.85 | 14.24 | 1.57 | 16.04 | 3.97 |
| AD-1548508.1 | 7.63 | 0.60 | 9.04 | 1.56 | 16.33 | 3.64 |
| AD-1548479.1 | 5.68 | 0.36 | 13.48 | 1.31 | 16.35 | 0.88 |
| AD-1548406.1 | 12.96 | 1.18 | 14.48 | 2.52 | 16.56 | 2.24 |
| AD-1548623.1 | 9.27 | 0.86 | 15.72 | 2.21 | 16.81 | 2.08 |
| AD-1548524.1 | 7.63 | 0.39 | 9.67 | 0.70 | 17.00 | 1.22 |
| AD-1548667.1 | 5.29 | 0.39 | 6.76 | 1.52 | 17.09 | 1.86 |
| AD-1548417.1 | 13.99 | 0.91 | 15.81 | 1.89 | 17.18 | 1.89 |
| AD-1548463.1 | 6.24 | 0.58 | 10.25 | 1.35 | 17.21 | 0.78 |
| AD-1548395.1 | 13.88 | 2.73 | 18.28 | 2.39 | 17.40 | 0.89 |
| AD-1548531.1 | 6.98 | 0.83 | 9.32 | 0.72 | 17.42 | 2.09 |
| AD-1548451.1 | 15.00 | 1.09 | 16.43 | 1.70 | 17.68 | 1.08 |
| AD-1548472.1 | 10.59 | 1.11 | 11.66 | 0.63 | 17.75 | 1.96 |
| AD-1548509.1 | 6.57 | 0.52 | 10.31 | 1.27 | 17.82 | 2.07 |
| AD-1548418.1 | 21.86 | 2.87 | 20.91 | 2.73 | 17.93 | 1.86 |
| AD-1548673.1 | 6.19 | 1.10 | 9.52 | 1.04 | 17.97 | 4.26 |
| AD-1548529.1 | 5.73 | 0.22 | 8.13 | 1.82 | 17.99 | 2.17 |
| AD-1548491.1 | 7.40 | 0.70 | 10.89 | 0.54 | 18.26 | 1.46 |
| AD-1548477.1 | 8.26 | 1.06 | 12.06 | 0.51 | 18.43 | 1.18 |
| AD-1548522.1 | 6.47 | 0.54 | 9.15 | 0.28 | 18.48 | 1.71 |
| AD-1548484.1 | 9.90 | 0.92 | 12.49 | 1.00 | 18.56 | 0.30 |
| AD-1548644.1 | 6.13 | 1.28 | 8.70 | 0.18 | 19.07 | 3.28 |
| AD-1548523.1 | 7.43 | 0.63 | 10.91 | 0.55 | 19.17 | 1.07 |
| AD-1548492.1 | 5.55 | 0.40 | 10.03 | 1.65 | 19.35 | 1.98 |
| AD-1548633.1 | 9.62 | 1.25 | 16.60 | 1.14 | 19.74 | 2.02 |
| AD-1548635.1 | 9.48 | 1.36 | 11.04 | 1.83 | 19.75 | 4.14 |
| AD-1548481.1 | 7.80 | 1.00 | 13.18 | 1.50 | 20.01 | 1.84 |
| AD-1548443.1 | 19.56 | 1.55 | 21.60 | 0.56 | 20.22 | 2.30 |
| AD-1548631.1 | 12.52 | 1.44 | 17.76 | 2.09 | 20.26 | 0.37 |
| AD-1548526.1 | 7.39 | 0.42 | 10.58 | 0.86 | 20.33 | 3.06 |
| AD-1548657.1 | 12.13 | 0.57 | 18.77 | 2.33 | 20.56 | 2.80 |
| AD-1548587.1 | 9.33 | 1.31 | 17.28 | 0.88 | 20.68 | 1.12 |
| AD-1548467.1 | 8.27 | 0.74 | 10.99 | 1.09 | 20.77 | 1.28 |
| AD-1548629.1 | 15.55 | 0.86 | 16.64 | 2.21 | 20.78 | 1.95 |
| AD-1548525.1 | 6.95 | 0.52 | 12.95 | 1.92 | 20.96 | 1.38 |
| AD-1548376.1 | 11.36 | 2.27 | 14.99 | 2.74 | 21.14 | 2.87 |
| AD-1548577.1 | 10.56 | 1.16 | 17.41 | 2.87 | 21.30 | 1.21 |
| AD-1548527.1 | 6.72 | 0.85 | 11.13 | 1.04 | 21.31 | 2.80 |
| AD-1548391.1 | 13.61 | 1.66 | 13.79 | 1.99 | 21.35 | 3.20 |
| AD-1548598.1 | 15.53 | 1.28 | 18.39 | 1.40 | 21.47 | 2.29 |
| AD-1548464.1 | 7.48 | 0.76 | 13.54 | 1.25 | 21.74 | 3.29 |
| AD-1548495.1 | 5.64 | 0.78 | 12.72 | 1.19 | 21.85 | 0.68 |
| AD-1548519.1 | 6.82 | 0.99 | 11.39 | 1.46 | 21.94 | 1.05 |
| AD-1548674.1 | 10.13 | 0.44 | 11.33 | 0.76 | 22.04 | 2.25 |
| AD-1548645.1 | 6.81 | 0.91 | 8.44 | 0.75 | 22.08 | 3.60 |
| AD-1548368.1 | 19.56 | 1.04 | 14.07 | 6.45 | 22.43 | 4.40 |
| AD-1548639.1 | 9.21 | 0.99 | 8.58 | 1.79 | 22.58 | 2.32 |
| AD-1548500.1 | 9.39 | 1.45 | 13.35 | 1.85 | 22.70 | 4.33 |
| AD-1548592.1 | 9.53 | 0.72 | 16.19 | 1.92 | 22.86 | 2.98 |
| AD-1548663.1 | 11.04 | 1.16 | 15.07 | 2.45 | 23.09 | 7.78 |
| AD-1548664.1 | 9.26 | 0.56 | 10.71 | 1.03 | 23.13 | 5.77 |
| AD-1548437.1 | 10.58 | 0.73 | 15.25 | 2.29 | 23.28 | 4.19 |
| AD-1548650.1 | 16.55 | 1.64 | 19.93 | 0.53 | 23.31 | 2.49 |
| AD-1548470.1 | 8.86 | 0.30 | 11.95 | 1.73 | 23.40 | 1.85 |
| AD-1548400.1 | 24.27 | 3.49 | 24.69 | 1.81 | 23.50 | 0.87 |
| AD-1548447.1 | 15.34 | 1.63 | 17.24 | 2.43 | 23.54 | 1.51 |
| AD-1548490.1 | 6.08 | 0.39 | 10.68 | 1.64 | 23.58 | 3.59 |
| AD-1548411.1 | 16.12 | 0.98 | 17.98 | 1.22 | 23.62 | 2.94 |
| AD-1548478.1 | 10.55 | 0.36 | 16.18 | 1.05 | 23.64 | 1.08 |
| AD-1548439.1 | 20.22 | 1.13 | 17.45 | 2.57 | 23.82 | 4.15 |
| AD-1548528.1 | 8.01 | 0.84 | 12.14 | 1.29 | 24.05 | 1.11 |
| AD-1548625.1 | 10.53 | 1.11 | 16.61 | 2.55 | 24.30 | 4.54 |
| AD-1548651.1 | 10.00 | 1.04 | 14.27 | 0.50 | 24.40 | 2.83 |
| AD-1548666.1 | 8.37 | 0.75 | 11.28 | 1.30 | 24.54 | 3.77 |
| AD-1548473.1 | 8.07 | 1.74 | 16.17 | 1.87 | 24.56 | 1.26 |
| AD-1548475.1 | 12.55 | 1.55 | 18.97 | 3.74 | 24.83 | 4.38 |
| AD-1548507.1 | 9.05 | 0.82 | 11.94 | 0.61 | 24.86 | 1.23 |
| AD-1548415.1 | 18.37 | 1.98 | 23.35 | 2.11 | 24.93 | 0.83 |
| AD-1548432.1 | 15.29 | 1.47 | 17.18 | 3.00 | 24.98 | 2.37 |
| AD-1548621.1 | 11.78 | 1.95 | 16.47 | 1.38 | 25.01 | 2.42 |
| AD-1548421.1 | 14.29 | 1.36 | 20.69 | 1.98 | 25.33 | 2.94 |
| AD-1548589.1 | 12.69 | 0.62 | 20.37 | 1.13 | 25.39 | 1.96 |
| AD-1548542.1 | 8.92 | 0.54 | 14.23 | 1.21 | 25.50 | 1.82 |
| AD-1548584.1 | 17.11 | 1.13 | 21.38 | 3.49 | 25.53 | 3.97 |
| AD-1548662.1 | 14.97 | 2.02 | 18.28 | 1.63 | 25.80 | 6.01 |
| AD-1548581.1 | 12.26 | 0.55 | 21.88 | 2.80 | 25.84 | 3.91 |
| AD-1548640.1 | 8.81 | 1.67 | 8.58 | 2.43 | 25.87 | 5.07 |
| AD-1548402.1 | 14.54 | 0.69 | 17.32 | 2.59 | 26.09 | 2.01 |
| AD-1548632.1 | 13.51 | 1.05 | 21.62 | 1.40 | 26.72 | 6.06 |
| AD-1548578.1 | 10.78 | 1.04 | 20.42 | 1.28 | 26.73 | 3.01 |
| AD-1548593.1 | 11.74 | 1.09 | 19.67 | 1.47 | 26.78 | 3.58 |
| AD-1548377.1 | 12.46 | 2.91 | 19.46 | 2.23 | 26.81 | 2.92 |
| AD-1548496.1 | 11.31 | 1.64 | 14.83 | 1.74 | 26.95 | 3.35 |
| AD-1548388.1 | 21.97 | 1.07 | 26.08 | 2.29 | 27.05 | 2.96 |
| AD-1548590.1 | 12.25 | 1.59 | 21.74 | 1.53 | 27.21 | 2.34 |
| AD-1548658.1 | 5.22 | 0.39 | 10.51 | 0.81 | 27.25 | 6.98 |
| AD-1548605.1 | 20.18 | 0.67 | 29.82 | 1.60 | 27.41 | 3.01 |
| AD-1548622.1 | 16.42 | 2.02 | 23.12 | 1.89 | 27.48 | 2.31 |
| AD-1548538.1 | 8.58 | 1.48 | 12.92 | 1.65 | 27.62 | 3.04 |
| AD-1548638.1 | 7.55 | 1.28 | 8.47 | 1.01 | 27.71 | 7.94 |
| AD-1548585.1 | 15.28 | 1.54 | 21.00 | 3.11 | 27.97 | 3.47 |
| AD-1548648.1 | 8.61 | 0.86 | 12.71 | 2.60 | 28.14 | 5.02 |
| AD-1548571.1 | 17.57 | 2.16 | 23.78 | 3.76 | 28.29 | 3.82 |
| AD-1548543.1 | 11.67 | 1.08 | 18.29 | 2.71 | 28.79 | 2.01 |
| AD-1548680.1 | 7.08 | 0.83 | 7.68 | 0.62 | 28.83 | 3.59 |
| AD-1548449.1 | 14.11 | 0.95 | 20.05 | 2.50 | 28.85 | 4.29 |
| AD-1548660.1 | 13.84 | 1.14 | 20.22 | 0.80 | 28.94 | 7.75 |
| AD-1548390.1 | 19.25 | 2.84 | 24.73 | 1.74 | 28.95 | 1.41 |
| AD-1548570.1 | 17.42 | 2.96 | 24.87 | 1.44 | 28.96 | 3.94 |
| AD-1548588.1 | 14.55 | 1.40 | 26.35 | 2.36 | 28.97 | 3.87 |
| AD-1548573.1 | 21.45 | 0.94 | 24.36 | 3.10 | 29.06 | 3.55 |
| AD-1548483.1 | 9.85 | 0.27 | 16.80 | 1.43 | 29.46 | 3.36 |
| AD-1548596.1 | 11.62 | 0.67 | 22.62 | 3.55 | 30.17 | 4.83 |
| AD-1548607.1 | 17.82 | 0.85 | 26.01 | 3.58 | 30.36 | 5.10 |
| AD-1548659.1 | 11.61 | 1.07 | 19.23 | 0.82 | 30.44 | 2.75 |
| AD-1548668.1 | 9.82 | 1.11 | 13.03 | 1.92 | 30.49 | 4.08 |
| AD-1548608.1 | 14.54 | 1.63 | 24.25 | 0.79 | 30.72 | 3.79 |
| AD-1548675.1 | 7.84 | 1.33 | 10.33 | 0.68 | 30.92 | 12.04 |
| AD-1548610.1 | 14.80 | 1.79 | 23.80 | 3.02 | 31.45 | 4.54 |
| AD-1548366.1 | 26.87 | 5.12 | 21.19 | 5.66 | 31.64 | 4.05 |
| AD-1548381.1 | 21.26 | 3.33 | 25.24 | 2.13 | 31.66 | 3.31 |
| AD-1548572.1 | 13.12 | 1.54 | 22.46 | 0.38 | 31.93 | 5.76 |
| AD-1548583.1 | 10.91 | 1.01 | 21.08 | 1.62 | 31.99 | 6.79 |
| AD-1548536.1 | 12.87 | 0.64 | 15.24 | 2.42 | 32.44 | 2.87 |
| AD-1548466.1 | 13.51 | 1.91 | 22.00 | 4.72 | 32.45 | 6.26 |
| AD-1548403.1 | 16.94 | 2.15 | 22.97 | 1.86 | 32.70 | 2.72 |
| AD-1548430.1 | 15.62 | 0.93 | 26.92 | 2.40 | 32.91 | 3.08 |
| AD-1548665.1 | 11.39 | 1.00 | 16.60 | 0.86 | 32.98 | 3.84 |
| AD-1548617.1 | 14.63 | 0.73 | 23.69 | 1.99 | 33.31 | 4.86 |
| AD-1548695.1 | 10.55 | 1.10 | 15.38 | 1.12 | 33.33 | 3.42 |
| AD-1548435.1 | 18.39 | 2.95 | 24.84 | 2.05 | 33.51 | 5.08 |
| AD-1548678.1 | 11.29 | 1.58 | 20.13 | 1.17 | 33.88 | 12.74 |
| AD-1548576.1 | 16.46 | 0.92 | 21.96 | 2.80 | 34.05 | 2.61 |
| AD-1548405.1 | 43.97 | 2.86 | 30.82 | 1.28 | 34.28 | 5.50 |
| AD-1548567.1 | 19.94 | 0.70 | 33.92 | 6.25 | 34.39 | 6.91 |
| AD-1548398.1 | 40.94 | 2.30 | 34.52 | 3.56 | 34.48 | 4.35 |
| AD-1548676.1 | 11.28 | 1.95 | 18.41 | 3.54 | 34.77 | 7.34 |
| AD-1548703.1 | 13.68 | 1.10 | 16.41 | 1.30 | 35.02 | 3.94 |
| AD-1548679.1 | 7.46 | 2.31 | 9.27 | 1.49 | 35.07 | 3.99 |
| AD-1548653.1 | 11.97 | 1.36 | 19.94 | 1.39 | 35.27 | 11.85 |
| AD-1548468.1 | 14.09 | 2.45 | 20.35 | 2.02 | 35.30 | 4.07 |
| AD-1548424.1 | 21.68 | 0.33 | 25.41 | 1.54 | 35.35 | 1.98 |
| AD-1548469.1 | 26.40 | 1.17 | 32.38 | 4.08 | 35.43 | 1.11 |
| AD-1548559.1 | 27.67 | 2.64 | 34.28 | 4.55 | 35.58 | 4.63 |
| AD-1548423.1 | 16.10 | 2.29 | 24.32 | 4.06 | 35.94 | 3.82 |
| AD-1548582.1 | 17.06 | 1.23 | 28.34 | 3.52 | 36.25 | 7.23 |
| AD-1548382.1 | 45.21 | 8.23 | 42.04 | 6.06 | 36.54 | 3.61 |
| AD-1548580.1 | 14.06 | 0.70 | 26.71 | 0.83 | 36.58 | 3.69 |
| AD-1548641.1 | 9.23 | 0.46 | 10.30 | 2.23 | 36.88 | 1.98 |
| AD-1548575.1 | 18.56 | 1.19 | 26.60 | 2.59 | 37.22 | 5.34 |
| AD-1548604.1 | 19.01 | 1.57 | 27.01 | 1.26 | 37.24 | 1.15 |
| AD-1548602.1 | 21.31 | 1.77 | 29.32 | 1.72 | 37.49 | 3.21 |
| AD-1548698.1 | 14.96 | 0.60 | 17.71 | 1.02 | 37.57 | 7.68 |
| AD-1548537.1 | 14.60 | 2.53 | 18.74 | 1.58 | 37.59 | 7.88 |
| AD-1548532.1 | 9.71 | 0.88 | 18.89 | 1.45 | 37.64 | 0.60 |
| AD-1548701.1 | 17.62 | 1.10 | 24.05 | 1.50 | 37.68 | 5.03 |
| AD-1548560.1 | 27.12 | 2.64 | 30.64 | 3.75 | 37.86 | 2.07 |
| AD-1548521.1 | 12.87 | 1.02 | 18.94 | 2.25 | 37.97 | 5.59 |
| AD-1548586.1 | 28.93 | 3.53 | 38.43 | 4.62 | 37.99 | 3.03 |
| AD-1548614.1 | 16.21 | 1.85 | 28.99 | 1.01 | 38.16 | 5.60 |
| AD-1548579.1 | 20.14 | 3.26 | 30.17 | 5.02 | 39.14 | 4.64 |
| AD-1548574.1 | 23.15 | 1.12 | 35.42 | 7.88 | 40.18 | 4.60 |
| AD-1548594.1 | 12.07 | 1.69 | 26.96 | 1.21 | 40.43 | 2.06 |
| AD-1548566.1 | 35.69 | 2.42 | 40.44 | 1.83 | 40.48 | 3.69 |
| AD-1548669.1 | 12.29 | 0.81 | 23.07 | 2.86 | 41.45 | 4.39 |
| AD-1548599.1 | 19.00 | 0.96 | 28.68 | 4.15 | 41.61 | 2.77 |
| AD-1548702.1 | 13.33 | 3.44 | 19.36 | 1.43 | 41.68 | 7.97 |
| AD-1548670.1 | 13.24 | 2.23 | 22.00 | 3.12 | 41.75 | 4.24 |
| AD-1548603.1 | 21.91 | 1.14 | 31.21 | 0.39 | 42.02 | 4.96 |
| AD-1548618.1 | 17.70 | 1.78 | 32.19 | 4.96 | 42.04 | 5.88 |
| AD-1548454.1 | 48.70 | 7.62 | 35.11 | 8.17 | 42.08 | 3.08 |
| AD-1548476.1 | 22.22 | 1.36 | 25.88 | 4.20 | 42.27 | 2.65 |
| AD-1548642.1 | 13.28 | 2.72 | 20.28 | 0.72 | 42.79 | 3.65 |
| AD-1548428.1 | 19.26 | 1.52 | 25.84 | 2.04 | 42.99 | 3.37 |
| AD-1548591.1 | 28.95 | 1.33 | 41.38 | 6.83 | 43.15 | 2.82 |
| AD-1548535.1 | 10.42 | 1.59 | 15.98 | 1.43 | 43.15 | 5.71 |
| AD-1548497.1 | 21.94 | 1.09 | 31.64 | 6.08 | 43.54 | 3.70 |
| AD-1548499.1 | 12.19 | 1.55 | 23.86 | 3.65 | 43.57 | 6.17 |
| AD-1548485.1 | 20.98 | 1.67 | 25.49 | 1.00 | 43.78 | 7.35 |
| AD-1548696.1 | 13.02 | 0.52 | 17.61 | 2.48 | 43.84 | 9.07 |
| AD-1548595.1 | 18.63 | 1.33 | 28.11 | 2.17 | 43.93 | 5.75 |
| AD-1548600.1 | 37.25 | 4.42 | 40.05 | 1.14 | 44.22 | 4.66 |
| AD-1548562.1 | 30.58 | 4.74 | 38.90 | 6.24 | 44.29 | 4.01 |
| AD-1548637.1 | 19.40 | 3.39 | 16.72 | 2.47 | 44.45 | 5.63 |
| AD-1548461.1 | 14.88 | 2.05 | 23.14 | 5.89 | 44.89 | 6.85 |
| AD-1548569.1 | 31.37 | 3.13 | 40.14 | 2.61 | 45.05 | 4.67 |
| AD-1548643.1 | 12.27 | 2.88 | 20.13 | 2.05 | 45.16 | 6.86 |
| AD-1548626.1 | 26.76 | 1.77 | 30.61 | 3.05 | 45.63 | 4.42 |
| AD-1548564.1 | 39.03 | 6.65 | 48.94 | 6.30 | 46.42 | 5.03 |
| AD-1548502.1 | 23.79 | 2.17 | 29.80 | 1.46 | 46.46 | 2.17 |
| AD-1548624.1 | 17.45 | 1.21 | 27.91 | 3.87 | 46.60 | 4.51 |
| AD-1548692.1 | 6.41 | 0.55 | 7.69 | 0.71 | 47.08 | 4.32 |
| AD-1548436.1 | 24.81 | 2.43 | 30.84 | 3.14 | 47.16 | 4.16 |
| AD-1548704.1 | 23.91 | 3.34 | 24.84 | 1.62 | 47.72 | 11.64 |
| AD-1548399.1 | 39.84 | 3.46 | 46.40 | 1.89 | 48.24 | 4.95 |
| AD-1548480.1 | 16.30 | 1.74 | 30.98 | 4.33 | 48.56 | 4.19 |
| AD-1548677.1 | 29.54 | 1.97 | 38.96 | 3.32 | 48.98 | 12.50 |
| AD-1548700.1 | 28.81 | 3.39 | 35.89 | 1.73 | 49.29 | 8.86 |
| AD-1548563.1 | 36.84 | 2.84 | 57.51 | 4.48 | 50.14 | 5.07 |
| AD-1548409.1 | 36.18 | 2.63 | 36.45 | 4.31 | 50.63 | 4.52 |
| AD-1548615.1 | 17.26 | 1.11 | 31.22 | 3.63 | 51.34 | 2.28 |
| AD-1548655.1 | 21.30 | 1.03 | 36.46 | 4.30 | 52.54 | 6.51 |
| AD-1548620.1 | 43.39 | 4.46 | 46.13 | 4.44 | 53.63 | 2.80 |
| AD-1548561.1 | 44.16 | 3.11 | 51.68 | 11.02 | 54.08 | 7.09 |
| AD-1548691.1 | 11.51 | 1.24 | 11.86 | 0.86 | 54.62 | 5.09 |
| AD-1548630.1 | 33.06 | 4.42 | 48.73 | 4.25 | 54.71 | 1.58 |
| AD-1548699.1 | 19.52 | 2.63 | 31.18 | 2.77 | 55.12 | 4.78 |
| AD-1548565.1 | 50.21 | 1.79 | 56.31 | 4.17 | 55.24 | 4.41 |
| AD-1548540.1 | 14.99 | 0.71 | 26.91 | 2.95 | 55.62 | 7.48 |
| AD-1548547.1 | 42.53 | 6.12 | 43.33 | 9.30 | 55.94 | 8.82 |
| AD-1548494.1 | 16.04 | 1.62 | 23.42 | 2.87 | 56.02 | 4.26 |
| AD-1548427.1 | 20.30 | 1.80 | 39.62 | 2.79 | 56.31 | 5.48 |
| AD-1548533.1 | 22.83 | 2.60 | 32.51 | 3.96 | 56.94 | 4.72 |
| AD-1548551.1 | 64.67 | 5.99 | 70.86 | 8.34 | 59.94 | 3.46 |
| AD-1548431.1 | 23.57 | 2.41 | 38.70 | 3.03 | 60.07 | 8.69 |
| AD-1548546.1 | 58.04 | 4.95 | 55.65 | 14.18 | 61.06 | 4.60 |
| AD-1548652.1 | 26.94 | 7.85 | 36.75 | 1.18 | 61.12 | 9.75 |
| AD-1548365.1 | 42.82 | 5.73 | 47.35 | 8.81 | 61.23 | 6.99 |
| AD-1548550.1 | 69.47 | 3.49 | 66.66 | 9.04 | 61.73 | 11.15 |
| AD-1548597.1 | 77.13 | 7.94 | 85.82 | 6.84 | 62.23 | 1.92 |
| AD-1548609.1 | 38.53 | 2.81 | 46.04 | 4.21 | 62.29 | 3.83 |
| AD-1548611.1 | 27.84 | 4.41 | 44.97 | 3.59 | 62.77 | 8.22 |
| AD-1548697.1 | 22.27 | 2.84 | 39.72 | 4.24 | 62.83 | 10.09 |
| AD-1548448.1 | 32.75 | 11.47 | 41.01 | 2.67 | 62.97 | 11.53 |
| AD-1548517.1 | 14.80 | 2.09 | 27.45 | 0.75 | 63.45 | 5.81 |
| AD-1548554.1 | 45.81 | 3.39 | 61.81 | 12.03 | 64.22 | 3.38 |
| AD-1548383.1 | 84.65 | 14.88 | 61.70 | 8.95 | 64.61 | 6.46 |
| AD-1548401.1 | 25.14 | 2.36 | 40.57 | 4.28 | 64.77 | 4.53 |
| AD-1548514.1 | 37.42 | 3.56 | 44.60 | 5.56 | 64.95 | 5.36 |
| AD-1548606.1 | 60.53 | 5.55 | 72.68 | 7.18 | 64.98 | 12.46 |
| AD-1548465.1 | 38.63 | 3.94 | 57.55 | 14.57 | 66.40 | 7.64 |
| AD-1548394.1 | 33.78 | 4.96 | 41.43 | 5.79 | 66.49 | 9.12 |
| AD-1548557.1 | 64.98 | 4.25 | 67.64 | 4.73 | 66.52 | 7.88 |
| AD-1548558.1 | 75.14 | 6.26 | 81.46 | 9.27 | 66.78 | 8.61 |
| AD-1548548.1 | 52.05 | 10.64 | 55.97 | 11.61 | 67.41 | 3.48 |
| AD-1548387.1 | 67.89 | 8.73 | 52.43 | 3.19 | 67.67 | 5.18 |
| AD-1548474.1 | 50.99 | 6.78 | 65.89 | 7.44 | 67.88 | 7.82 |
| AD-1548619.1 | 36.48 | 0.37 | 52.65 | 10.68 | 68.49 | 5.56 |
| AD-1548601.1 | 51.77 | 0.64 | 56.93 | 4.47 | 68.83 | 5.62 |
| AD-1548369.1 | 55.87 | 16.62 | 51.63 | 8.97 | 68.84 | 11.40 |
| AD-1548613.1 | 35.52 | 1.70 | 41.91 | 2.62 | 69.40 | 12.19 |
| AD-1548553.1 | 54.07 | 4.53 | 57.10 | 2.69 | 69.80 | 3.75 |
| AD-1548693.1 | 15.16 | 0.34 | 15.48 | 1.04 | 69.92 | 5.84 |
| AD-1548555.1 | 47.63 | 7.43 | 57.73 | 9.47 | 70.52 | 5.40 |
| AD-1548520.1 | 16.86 | 0.88 | 32.98 | 2.06 | 70.81 | 3.77 |
| AD-1548552.1 | 52.43 | 7.14 | 59.80 | 1.96 | 72.33 | 6.73 |
| AD-1548370.1 | 46.33 | 12.84 | 53.84 | 6.50 | 72.52 | 8.10 |
| AD-1548505.1 | 45.53 | 6.49 | 56.21 | 5.63 | 72.91 | 3.56 |
| AD-1548545.1 | 58.24 | 11.98 | 58.99 | 8.49 | 74.12 | 16.72 |
| AD-1548539.1 | 51.88 | 1.66 | 59.78 | 4.26 | 75.56 | 2.24 |
| AD-1548549.1 | 61.61 | 2.48 | 64.92 | 10.07 | 75.70 | 5.95 |
| AD-1548556.1 | 55.49 | 4.88 | 62.86 | 3.83 | 75.83 | 3.59 |
| AD-1548616.1 | 45.80 | 7.83 | 55.40 | 7.94 | 79.15 | 2.99 |
| AD-1548482.1 | 69.01 | 11.78 | 78.29 | 6.48 | 79.33 | 5.40 |
| AD-1548501.1 | 60.77 | 2.61 | 73.05 | 6.25 | 79.67 | 7.90 |
| AD-1548681.1 | 12.07 | 1.95 | 20.36 | 2.91 | 80.58 | 18.49 |
| AD-1548504.1 | 77.48 | 6.09 | 84.06 | 5.28 | 81.64 | 7.97 |
| AD-1548425.1 | 45.11 | 2.53 | 49.58 | 8.06 | 82.13 | 10.13 |
| AD-1548671.1 | 51.86 | 8.58 | 72.37 | 5.01 | 84.11 | 14.72 |
| AD-1548544.1 | 66.15 | 19.91 | 82.59 | 13.59 | 85.56 | 10.49 |
| AD-1548534.1 | 41.26 | 0.92 | 57.38 | 2.99 | 86.89 | 4.85 |
| AD-1548445.1 | 97.62 | 8.98 | 81.83 | 6.71 | 87.11 | 5.86 |
| AD-1548433.1 | 94.39 | 5.60 | 83.20 | 3.63 | 88.16 | 2.91 |
| AD-1548455.1 | 74.25 | 2.00 | 80.48 | 9.46 | 88.69 | 4.55 |
| AD-1548429.1 | 72.90 | 5.96 | 74.01 | 4.26 | 89.02 | 9.93 |
| AD-1548386.1 | 77.39 | 5.39 | 69.06 | 7.07 | 91.10 | 2.33 |
| AD-1548690.1 | 28.19 | 5.69 | 30.38 | 4.70 | 91.93 | 10.63 |
| AD-1548541.1 | 68.53 | 7.69 | 91.69 | 19.67 | 97.83 | 10.51 |
| AD-1548506.1 | 68.16 | 9.18 | 78.19 | 5.42 | 102.21 | 9.47 |
| AD-1548518.1 | 75.11 | 6.07 | 84.41 | 8.00 | 102.82 | 6.29 |
| AD-1548410.1 | 87.37 | 18.16 | 95.77 | 9.50 | 102.99 | 5.91 |
| AD-1548686.1 | 24.37 | 2.14 | 38.09 | 8.32 | 105.02 | 8.13 |
| AD-1548694.1 | 14.47 | 0.55 | 21.59 | 1.41 | 106.25 | 12.84 |
| AD-1548422.1 | 108.87 | 9.66 | 106.72 | 12.95 | 109.92 | 8.24 |
| AD-1548689.1 | 35.02 | 4.55 | 32.82 | 2.77 | 120.89 | 23.72 |
| AD-1548446.1 | 115.57 | 9.32 | 103.06 | 10.57 | 122.37 | 8.71 |
| AD-1548688.1 | 44.04 | 2.29 | 54.21 | 2.64 | 141.92 | 15.39 |
| AD-1548687.1 | 42.98 | 7.70 | 50.98 | 3.19 | 142.40 | 24.95 |
| AD-1548683.1 | 55.32 | 5.04 | 59.79 | 5.28 | 156.44 | 36.70 |
| AD-1548685.1 | 33.95 | 6.03 | 45.16 | 2.86 | 157.19 | 13.12 |
| AD-1548682.1 | 69.60 | 5.53 | 56.71 | 2.73 | 161.28 | 8.92 |
| AD-1548684.1 | 59.65 | 4.71 | 67.76 | 2.58 | 161.94 | 28.86 |

### Example 3. Additional Duplexes Targeting Beta-Catenin (CTNNB1)

[0815] Additional siRNAs targeting the human beta-catenin (CTNNB1) gene (human: NCBI refseqID NM_001904.4, NCBI GeneID: 1499) were designed and synthesized as described above.

[0816] Single dose screens at 10 nM, 1 nM, and 01. nM were performed in Hep3B cells as described above.

[0817] Detailed lists of the additional unmodified CTNNB1 sense and antisense strand nucleotide sequences are shown in Table 5. Detailed lists of the additional modified CTNNB1 sense and antisense strand nucleotide sequences are shown in Table 6.

[0818] The results of a single dose screen of the agents in Tables 5 and 6 in Hep3B cells are shown in Table 7.

TABLE 5
Unmodified Sense and Antisense Strand Sequences of CTNNB1 dsRNA Agents

| | | SEQ | Range | | SEQ | Range |
|---|---|---|---|---|---|---|
| Duplex | Sense Sequence | ID | in NM_ | Antisense Sequence | ID | in NM_ |
| Name | 5′ to 3′ | NO: | 001904.4 | 5′ to 3′ | NO: | 001904.4 |
| AD-1210479 | ACUCUGGAAUCCAUUCUGGUA | 1625 | 309-329 | UACCAGAAUGGAUUCCAGAGUCC | 1670 | 307-329 |
| AD-1210480 | CUCUGGAAUCCAUUCUGGUGA | 1626 | 310-330 | UCACCAGAAUGGAUUCCAGAGUC | 1671 | 308-330 |
| AD-1210732 | UGCUCAUCCCACUAAUGUCCA | 1627 | 562-582 | UGGACAUUAGUGGGAUGAGCAGC | 1672 | 560-582 |
| AD-1210734 | CUCAUCCCACUAAUGUCCAGA | 1628 | 564-584 | UCUGGACAUUAGUGGGAUGAGCA | 1673 | 562-584 |
| AD-1211064 | CCAUGCAGAAUACAAAUGAUA | 65 | 816-836 | UAUCAUUUGUAUUCUGCAUGGUA | 1674 | 814-836 |
| AD-1211065 | CAUGCAGAAUACAAAUGAUGA | 66 | 817-837 | UCAUCAUUUGUAUUCUGCAUGGU | 1675 | 815-837 |
| AD-1211578 | AGAAGGAGCUAAAAUGGCAGA | 1629 | 1012-1032 | UCUGCCAUUUUAGCUCCUUCUUG | 1676 | 1010-1032 |
| AD-1211582 | GGAGCUAAAAUGGCAGUGCGA | 1630 | 1016-1036 | UCGCACUGCCAUUUUAGCUCCUU | 1677 | 1014-1036 |
| AD-1211675 | UACUGGCCAUCUUUAAGUCUA | 1631 | 897-917 | UAGACUUAAAGAUGGCCAGUAAG | 1678 | 895-917 |
| AD-1211676 | ACUGGCCAUCUUUAAGUCUGA | 72 | 898-918 | UCAGACUUAAAGAUGGCCAGUAA | 1679 | 896-918 |
| AD-1211677 | CUGGCCAUCUUUAAGUCUGGA | 73 | 899-919 | UCCAGACUUAAAGAUGGCCAGUA | 377 | 897-919 |
| AD-1212720 | UAACCUCACUUGCAAUAAUUA | 106 | 1489-1509 | UAAUUAUUGCAAGUGAGGUUAGA | 1680 | 1487-1509 |
| AD-1212721 | AACCUCACUUGCAAUAAUUAA | 107 | 1490-1510 | UUAAUUAUUGCAAGUGAGGUUAG | 1681 | 1488-1510 |
| AD-1213112 | GCCAUCUGUGCUCUUCGUCAA | 118 | 1604-1624 | UUGACGAAGAGCACAGAUGGCAG | 1682 | 1602-1624 |
| AD-1213113 | CCAUCUGUGCUCUUCGUCAUA | 119 | 1605-1625 | UAUGACGAAGAGCACAGAUGGCA | 426 | 1603-1625 |
| AD-1213115 | AUCUGUGCUCUUCGUCAUCUA | 120 | 1607-1627 | UAGAUGACGAAGAGCACAGAUGG | 1683 | 1605-1627 |
| AD-1213116 | UCUGUGCUCUUCGUCAUCUGA | 121 | 1608-1628 | UCAGAUGACGAAGAGCACAGAUG | 428 | 1606-1628 |
| AD-1213117 | CUGUGCUCUUCGUCAUCUGAA | 122 | 1609-1629 | UUCAGAUGACGAAGAGCACAGAU | 1684 | 1607-1629 |
| AD-1213118 | UGUGCUCUUCGUCAUCUGACA | 123 | 1610-1630 | UGUCAGAUGACGAAGAGCACAGA | 430 | 1608-1630 |
| AD-1213119 | GUGCUCUUCGUCAUCUGACCA | 1632 | 1611-1631 | UGGUCAGAUGACGAAGAGCACAG | 1685 | 1609-1631 |
| AD-1213749 | ACUGUUGGAUUGAUUCGAAAA | 134 | 1742-1762 | UUUUCGAAUCAAUCCAACAGUAG | 1686 | 1740-1762 |
| AD-1214765 | AAAUACCAUUCCAUUGUUUGA | 155 | 1993-2013 | UCAAACAAUGGAAUGGUAUUUAG | 465 | 1991-2013 |
| AD-1214768 | UACCAUUCCAUUGUUUGUGCA | 158 | 1996-2016 | UGCACAAACAAUGGAAUGGUAUU | 1687 | 1994-2016 |
| AD-1214770 | CCAUUCCAUUGUUUGUGCAGA | 160 | 1998-2018 | UCUGCACAAACAAUGGAAUGGUA | 471 | 1996-2018 |
| AD-1215017 | GUCCUCUGUGAACUUGCUCAA | 1633 | 2063-2083 | UUGAGCAAGUUCACAGAGGACCC | 1688 | 2061-2083 |
| AD-1215018 | UCCUCUGUGAACUUGCUCAGA | 1634 | 2064-2084 | UCUGAGCAAGUUCACAGAGGACC | 1689 | 2062-2084 |
| AD-1216131 | AUCGUUCUUUUCACUCUGGUA | 1635 | 2361-2381 | UACCAGAGUGAAAAGAACGAUAG | 1690 | 2359-2381 |
| AD-1216132 | UCGUUCUUUUCACUCUGGUGA | 1636 | 2362-2382 | UCACCAGAGUGAAAAGAACGAUA | 1691 | 2360-2382 |
| AD-1216345 | UGGUGCUGACUAUCCAGUUGA | 1637 | 2446-2466 | UCAACUGGAUAGUCAGCACCAGG | 1692 | 2444-2466 |
| AD-1216349 | GCUGACUAUCCAGUUGAUGGA | 1638 | 2450-2470 | UCCAUCAACUGGAUAGUCAGCAC | 1693 | 2448-2470 |
| AD-1216350 | CUGACUAUCCAGUUGAUGGGA | 1639 | 2451-2471 | UCCCAUCAACUGGAUAGUCAGCA | 1694 | 2449-2471 |
| AD-1216352 | GACUAUCCAGUUGAUGGGCUA | 1640 | 2453-2473 | UAGCCCAUCAACUGGAUAGUCAG | 1695 | 2451-2473 |
| AD-1216506 | AUUGGCCUGUAGAGUUGCUGA | 1641 | 2903-2923 | UCAGCAACUCUACAGGCCAAUCA | 1696 | 2901-2923 |
| AD-1216525 | GGCUGGUAUCUCAGAAAGUGA | 1642 | 2940-2960 | UCACUUUCUGAGAUACCAGCCCA | 1697 | 2938-2960 |
| AD-1216526 | GCUGGUAUCUCAGAAAGUGCA | 1643 | 2941-2961 | UGCACUUUCUGAGAUACCAGCCC | 1698 | 2939-2961 |
| AD-1216528 | UGGUAUCUCAGAAAGUGCCUA | 1644 | 2943-2963 | UAGGCACUUUCUGAGAUACCAGC | 1699 | 2941-2963 |
| AD-1216546 | CUGACACACUAACCAAGCUGA | 200 | 2961-2981 | UCAGCUUGGUUAGUGUGUCAGGC | 1700 | 2959-2981 |
| AD-1216556 | AACCAAGCUGAGUUUCCUAUA | 1645 | 2971-2991 | UAUAGGAAACUCAGCUUGGUUAG | 1701 | 2969-2991 |
| AD-1216558 | CCAAGCUGAGUUUCCUAUGGA | 1646 | 2973-2993 | UCCAUAGGAAACUCAGCUUGGUU | 1702 | 2971-2993 |
| AD-1216559 | CAAGCUGAGUUUCCUAUGGGA | 1647 | 2974-2994 | UCCCAUAGGAAACUCAGCUUGGU | 1703 | 2972-2994 |
| AD-1216560 | AAGCUGAGUUUCCUAUGGGAA | 1648 | 2975-2995 | UUCCCAUAGGAAACUCAGCUUGG | 1704 | 2973-2995 |
| AD-1216561 | AGCUGAGUUUCCUAUGGGAAA | 202 | 2976-2996 | UUUCCCAUAGGAAACUCAGCUUG | 515 | 2974-2996 |
| AD-1216592 | UUGUUCUGGUCCUUUUUGGUA | 1649 | 3013-3033 | UACCAAAAAGGACCAGAACAAAA | 1705 | 3011-3033 |
| AD-1216593 | UGUUCUGGUCCUUUUUGGUCA | 1650 | 3014-3034 | UGACCAAAAAGGACCAGAACAAA | 1706 | 3012-3034 |
| AD-1216594 | GUUCUGGUCCUUUUUGGUCGA | 1651 | 3015-3035 | UCGACCAAAAAGGACCAGAACAA | 1707 | 3013-3035 |
| AD-1216595 | UUCUGGUCCUUUUUGGUCGAA | 1652 | 3016-3036 | UUCGACCAAAAAGGACCAGAACA | 1708 | 3014-3036 |
| AD-1216596 | UCUGGUCCUUUUUGGUCGAGA | 1653 | 3017-3037 | UCUCGACCAAAAAGGACCAGAAC | 1709 | 3015-3037 |
| AD-1216597 | CUGGUCCUUUUUGGUCGAGGA | 1654 | 3018-3038 | UCCUCGACCAAAAAGGACCAGAA | 1710 | 3016-3038 |
| AD-1216613 | GAGGAGUAACAAUACAAAUGA | 1655 | 3034-3054 | UCAUUUGUAUUGUUACUCCUCGA | 1711 | 3032-3054 |
| AD-1216784 | AUGGUGUAGAACACUAAUUCA | 222 | 3314-3334 | UGAAUUAGUGUUCUACACCAUUA | 1712 | 3312-3334 |
| AD-1216786 | GGUGUAGAACACUAAUUCAUA | 224 | 3316-3336 | UAUGAAUUAGUGUUCUACACCAU | 1713 | 3314-3336 |
| AD-1216787 | GUGUAGAACACUAAUUCAUAA | 225 | 3317-3337 | UUAUGAAUUAGUGUUCUACACCA | 539 | 3315-3337 |
| AD-1216790 | UAGAACACUAAUUCAUAAUCA | 228 | 3320-3340 | UGAUUAUGAAUUAGUGUUCUACA | 1714 | 3318-3340 |
| AD-1216792 | GAACACUAAUUCAUAAUCACA | 230 | 3322-3342 | UGUGAUUAUGAAUUAGUGUUCUA | 1715 | 3320-3342 |
| AD-1216895 | UGCUUAAAAUAAGCAGGUGGA | 1656 | 3440-3460 | UCCACCUGCUUAUUUUAAGCAUA | 1716 | 3438-3460 |
| AD-1216904 | UAAGCAGGUGGAUCUAUUUCA | 1657 | 3449-3469 | UGAAAUAGAUCCACCUGCUUAUU | 1717 | 3447-3469 |
| AD-1216906 | AGCAGGUGGAUCUAUUUCAUA | 1658 | 3451-3471 | UAUGAAAUAGAUCCACCUGCUUA | 1718 | 3449-3471 |
| AD-1216907 | GCAGGUGGAUCUAUUUCAUGA | 1659 | 3452-3472 | UCAUGAAAUAGAUCCACCUGCUU | 1719 | 3450-3472 |
| AD-1216910 | GGUGGAUCUAUUUCAUGUUUA | 1660 | 3455-3475 | UAAACAUGAAAUAGAUCCACCUG | 1720 | 3453-3475 |
| AD-1216911 | GUGGAUCUAUUUCAUGUUUUA | 1661 | 3456-3476 | UAAAACAUGAAAUAGAUCCACCU | 1721 | 3454-3476 |
| AD-1216913 | GGAUCUAUUUCAUGUUUUUGA | 1662 | 3458-3478 | UCAAAAACAUGAAAUAGAUCCAC | 1722 | 3456-3478 |
| AD-1216938 | GGGUAGGGUAAAUCAGUAAGA | 1663 | 3503-3523 | UCUUACUGAUUUACCCUACCCAU | 1723 | 3501-3523 |
| AD-1216940 | GUAGGGUAAAUCAGUAAGAGA | 236 | 3505-3525 | UCUCUUACUGAUUUACCCUACCC | 1724 | 3503-3525 |
| AD-1216941 | UAGGGUAAAUCAGUAAGAGGA | 1664 | 3506-3526 | UCCUCUUACUGAUUUACCCUACC | 1725 | 3504-3526 |
| AD-1216942 | AGGGUAAAUCAGUAAGAGGUA | 237 | 3507-3527 | UACCUCUUACUGAUUUACCCUAC | 1726 | 3505-3527 |
| AD-1216944 | GGUAAAUCAGUAAGAGGUGUA | 1665 | 3509-3529 | UACACCUCUUACUGAUUUACCCU | 1727 | 3507-3529 |
| AD-1216945 | GUAAAUCAGUAAGAGGUGUUA | 239 | 3510-3530 | UAACACCUCUUACUGAUUUACCC | 554 | 3508-3530 |
| AD-1216989 | UUACCAGUUGCCUUUUAUCCA | 1666 | 3554-3574 | UGGAUAAAAGGCAACUGGUAAAC | 1728 | 3552-3574 |
| AD-1216990 | UACCAGUUGCCUUUUAUCCCA | 1667 | 3555-3575 | UGGGAUAAAAGGCAACUGGUAAA | 1729 | 3553-3575 |
| AD-1217004 | UAUCCCAAAGUUGUUGUAACA | 1668 | 3569-3589 | UGUUACAACAACUUUGGGAUAAA | 1730 | 3567-3589 |
| AD-1217007 | CCCAAAGUUGUUGUAACCUGA | 1669 | 3572-3592 | UCAGGUUACAACAACUUUGGGAU | 1731 | 3570-3592 |
| AD-70947 | UACUGUUGGAUUGAUUCGAAA | 19 | 1741-1761 | UUUCGAAUCAAUCCAACAGUAGC | 1732 | 1739-1761 |

TABLE 6
Modified Sense and Antisense Strand Sequences of CTNNB1 dsRNA Agents

| | | SEQ | | SEQ | | |
|---|---|---|---|---|---|---|
| Duplex | | ID | | ID | | SEQ ID |
| Name | Sense Sequence 5′ to 3′ | NO: | Antisense Sequence 5′ to 3′ | NO: | mRNA Target Sequence | NO: |
| AD- | ascsucugGfaAfUfCfcauucugguaL96 | 1733 | VPusAfsccaGfaAfUfggauUfcCfagaguscsc | 1805 | GGACUCUGGAAUCCAUUCUGGUG | 1877 |
| 1210479 | | | | | | |
| AD- | csuscuggAfaUfCfCfauucuggugaL96 | 1734 | VPusCfsaccAfgAfAfuggaUfuCfcagagsusc | 1806 | GACUCUGGAAUCCAUUCUGGUGC | 1878 |
| 1210480 | | | | | | |
| AD- | usgscucaUfcCfCfAfcuaauguccaL96 | 1735 | VPusGfsgacAfuUfAfguggGfaUfgagcasgsc | 1807 | GCUGCUCAUCCCACUAAUGUCCA | 1879 |
| 1210732 | | | | | | |
| AD- | csuscaucCfcAfCfUfaauguccagaL96 | 1736 | VPusCfsuggAfcAfUfuaguGfgGfaugagscsa | 1808 | UGCUCAUCCCACUAAUGUCCAGC | 1880 |
| 1210734 | | | | | | |
| AD- | cscsaugcAfgAfAfUfacaaaugauaL96 | 1737 | VPusAfsucaUfuUfGfuauuCfuGfcauggsusa | 1809 | UACCAUGCAGAAUACAAAUGAUG | 1364 |
| 1211064 | | | | | | |
| AD- | csasugcaGfaAfUfAfcaaaugaugaL96 | 1738 | VPusCfsaucAfuUfUfguauUfcUfgcaugsgsu | 1810 | ACCAUGCAGAAUACAAAUGAUGU | 1365 |
| 1211065 | | | | | | |
| AD- | asgsaaggAfgCfUfAfaaauggcagaL96 | 1739 | VPusCfsugcCfaUfUfuuagCfuCfcuucususg | 1811 | CAAGAAGGAGCUAAAAUGGCAGU | 1881 |
| 1211578 | | | | | | |
| AD- | gsgsagcuAfaAfAfUfggcagugcgaL96 | 1740 | VPusCfsgcaCfuGfCfcauuUfuAfgcuccsusu | 1812 | AAGGAGCUAAAAUGGCAGUGCGU | 1882 |
| 1211582 | | | | | | |
| AD- | usascuggCfcAfUfCfuuuaagucuaL96 | 1741 | VPusAfsgacUfuAfAfagauGfgCfcaguasasg | 1813 | CUUACUGGCCAUCUUUAAGUCUG | 1883 |
| 1211675 | | | | | | |
| AD- | ascsuggcCfaUfCfUfuuaagucugaL96 | 1742 | VPusCfsagaCfuUfAfaagaUfgGfccagusasa | 1814 | UUACUGGCCAUCUUUAAGUCUGG | 1371 |
| 1211676 | | | | | | |
| AD- | csusggccAfuCfUfUfuaagucuggaL96 | 1743 | VPusCfscagAfcUfUfaaagAfuGfgccagsusa | 1815 | UACUGGCCAUCUUUAAGUCUGGA | 1372 |
| 1211677 | | | | | | |
| AD- | usasaccuCfaCfUfUfgcaauaauuaL96 | 1744 | VPusAfsauuAfuUfGfcaagUfgAfgguuasgsa | 1816 | UCUAACCUCACUUGCAAUAAUUA | 1405 |
| 1212720 | | | | | | |
| AD- | asasccucAfcUfUfGfcaauaauuaaL96 | 1745 | VPusUfsaauUfaUfUfgcaaGfuGfagguusasg | 1817 | CUAACCUCACUUGCAAUAAUUAU | 1406 |
| 1212721 | | | | | | |
| AD- | gscscaucUfgUfGfCfucuucgucaaL96 | 1746 | VPusUfsgacGfaAfGfagcaCfaGfauggcsasg | 1818 | CUGCCAUCUGUGCUCUUCGUCAU | 1417 |
| 1213112 | | | | | | |
| AD- | cscsaucuGfuGfCfUfcuucgucauaL96 | 1747 | VPusAfsugaCfgAfAfgagcAfcAfgauggscsa | 1819 | UGCCAUCUGUGCUCUUCGUCAUC | 1418 |
| 1213113 | | | | | | |
| AD- | asuscuguGfcUfCfUfucgucaucuaL96 | 1748 | VPusAfsgauGfaCfGfaagaGfcAfcagausgsg | 1820 | CCAUCUGUGCUCUUCGUCAUCUG | 1419 |
| 1213115 | | | | | | |
| AD- | uscsugugCfuCfUfUfcgucaucugaL96 | 1749 | VPusCfsagaUfgAfCfgaagAfgCfacagasusg | 1821 | CAUCUGUGCUCUUCGUCAUCUGA | 1420 |
| 1213116 | | | | | | |
| AD- | csusgugcUfcUfUfCfgucaucugaaL96 | 1750 | VPusUfscagAfuGfAfcgaaGfaGfcacagsasu | 1822 | AUCUGUGCUCUUCGUCAUCUGAC | 1421 |
| 1213117 | | | | | | |
| AD- | usgsugcuCfuUfCfGfucaucugacaL96 | 1751 | VPusGfsucaGfaUfGfacgaAfgAfgcacasgsa | 1823 | UCUGUGCUCUUCGUCAUCUGACC | 1422 |
| 1213118 | | | | | | |
| AD- | gsusgcucUfuCfGfUfcaucugaccaL96 | 1752 | VPusGfsgucAfgAfUfgacgAfaGfagcacsasg | 1824 | CUGUGCUCUUCGUCAUCUGACCA | 1884 |
| 1213119 | | | | | | |
| AD- | ascsuguuGfgAfUfUfgauucgaaaaL96 | 1753 | VPusUfsuucGfaAfUfcaauCfcAfacagusasg | 1825 | CUACUGUUGGAUUGAUUCGAAAU | 1434 |
| 1213749 | | | | | | |
| AD- | asasauacCfaUfUfCfcauuguuugaL96 | 1754 | VPusCfsaaaCfaAfUfggaaUfgGfuauuusasg | 1826 | CUAAAUACCAUUCCAUUGUUUGU | 1455 |
| 1214765 | | | | | | |
| AD- | usasccauUfcCfAfUfuguuugugcaL96 | 1755 | VPusGfscacAfaAfCfaaugGfaAfugguasusu | 1827 | AAUACCAUUCCAUUGUUUGUGCA | 1458 |
| 1214768 | | | | | | |
| AD- | cscsauucCfaUfUfGfuuugugcagaL96 | 1756 | VPusCfsugcAfcAfAfacaaUfgGfaauggsusa | 1828 | UACCAUUCCAUUGUUUGUGCAGC | 1460 |
| 1214770 | | | | | | |
| AD- | gsusccucUfgUfGfAfacuugcucaaL96 | 1757 | VPusUfsgagCfaAfGfuucaCfaGfaggacscsc | 1829 | GGGUCCUCUGUGAACUUGCUCAG | 1885 |
| 1215017 | | | | | | |
| AD- | uscscucuGfuGfAfAfcuugcucagaL96 | 1758 | VPusCfsugaGfcAfAfguucAfcAfgaggascsc | 1830 | GGUCCUCUGUGAACUUGCUCAGG | 1886 |
| 1215018 | | | | | | |
| AD- | asuscguuCfuUfUfUfcacucugguaL96 | 1759 | VPusAfsccaGfaGfUfgaaaAfgAfacgausasg | 1831 | CUAUCGUUCUUUUCACUCUGGUG | 1887 |
| 1216131 | | | | | | |
| AD- | uscsguucUfuUfUfCfacucuggugaL96 | 1760 | VPusCfsaccAfgAfGfugaaAfaGfaacgasusa | 1832 | UAUCGUUCUUUUCACUCUGGUGG | 1888 |
| 1216132 | | | | | | |
| AD- | usgsgugcUfgAfCfUfauccaguugaL96 | 1761 | VPusCfsaacUfgGfAfuaguCfaGfcaccasgsg | 1833 | CCUGGUGCUGACUAUCCAGUUGA | 1889 |
| 1216345 | | | | | | |
| AD- | gscsugacUfaUfCfCfaguugauggaL96 | 1762 | VPusCfscauCfaAfCfuggaUfaGfucagcsasc | 1834 | GUGCUGACUAUCCAGUUGAUGGG | 1890 |
| 1216349 | | | | | | |
| AD- | csusgacuAfuCfCfAfguugaugggaL96 | 1763 | VPusCfsccaUfcAfAfcuggAfuAfgucagscsa | 1835 | UGCUGACUAUCCAGUUGAUGGGC | 1891 |
| 1216350 | | | | | | |
| AD- | gsascuauCfcAfGfUfugaugggcuaL96 | 1764 | VPusAfsgccCfaUfCfaacuGfgAfuagucsasg | 1836 | CUGACUAUCCAGUUGAUGGGCUG | 1892 |
| 1216352 | | | | | | |
| AD- | asusuggcCfuGfUfAfgaguugcugaL96 | 1765 | VPusCfsagcAfaCfUfcuacAfgGfccaauscsa | 1837 | UGAUUGGCCUGUAGAGUUGCUGA | 1893 |
| 1216506 | | | | | | |
| AD- | gsgscuggUfaUfCfUfcagaaagugaL96 | 1766 | VPusCfsacuUfuCfUfgagaUfaCfcagccscsa | 1838 | UGGGCUGGUAUCUCAGAAAGUGC | 1894 |
| 1216525 | | | | | | |
| AD- | gscsugguAfuCfUfCfagaaagugcaL96 | 1767 | VPusGfscacUfuUfCfugagAfuAfccagcscsc | 1839 | GGGCUGGUAUCUCAGAAAGUGCC | 1895 |
| 1216526 | | | | | | |
| AD- | usgsguauCfuCfAfGfaaagugccuaL96 | 1768 | VPusAfsggcAfcUfUfucugAfgAfuaccasgsc | 1840 | GCUGGUAUCUCAGAAAGUGCCUG | 1896 |
| 1216528 | | | | | | |
| AD- | csusgacaCfaCfUfAfaccaagcugaL96 | 1769 | VPusCfsagcUfuGfGfuuagUfgUfgucagsgsc | 1841 | GCCUGACACACUAACCAAGCUGA | 1500 |
| 1216546 | | | | | | |
| AD- | asasccaaGfcUfGfAfguuuccuauaL96 | 1770 | VPusAfsuagGfaAfAfcucaGfcUfugguusasg | 1842 | CUAACCAAGCUGAGUUUCCUAUG | 1897 |
| 1216556 | | | | | | |
| AD- | cscsaagcUfgAfGfUfuuccuauggaL96 | 1771 | VPusCfscauAfgGfAfaacuCfaGfcuuggsusu | 1843 | AACCAAGCUGAGUUUCCUAUGGG | 1898 |
| 1216558 | | | | | | |
| AD- | csasagcuGfaGfUfUfuccuaugggaL96 | 1772 | VPusCfsccaUfaGfGfaaacUfcAfgcuugsgsu | 1844 | ACCAAGCUGAGUUUCCUAUGGGA | 1899 |
| 1216559 | | | | | | |
| AD- | asasgcugAfgUfUfUfccuaugggaaL96 | 1773 | VPusUfscccAfuAfGfgaaaCfuCfagcuusgsg | 1845 | CCAAGCUGAGUUUCCUAUGGGAA | 1900 |
| 1216560 | | | | | | |
| AD- | asgscugaGfuUfUfCfcuaugggaaaL96 | 1774 | VPusUfsuccCfaUfAfggaaAfcUfcagcususg | 1846 | CAAGCUGAGUUUCCUAUGGGAAC | 1502 |
| 1216561 | | | | | | |
| AD- | ususguucUfgGfUfCfcuuuuugguaL96 | 1775 | VPusAfsccaAfaAfAfggacCfaGfaacaasasa | 1847 | UUUUGUUCUGGUCCUUUUUGGUC | 1901 |
| 1216592 | | | | | | |
| AD- | usgsuucuGfgUfCfCfuuuuuggucaL96 | 1776 | VPusGfsaccAfaAfAfaggaCfcAfgaacasasa | 1848 | UUUGUUCUGGUCCUUUUUGGUCG | 1902 |
| 1216593 | | | | | | |
| AD- | gsusucugGfuCfCfUfuuuuggucgaL96 | 1777 | VPusCfsgacCfaAfAfaaggAfcCfagaacsasa | 1849 | UUGUUCUGGUCCUUUUUGGUCGA | 1903 |
| 1216594 | | | | | | |
| AD- | ususcuggUfcCfUfUfuuuggucgaaL96 | 1778 | VPusUfscgaCfcAfAfaaagGfaCfcagaascsa | 1850 | UGUUCUGGUCCUUUUUGGUCGAG | 1904 |
| 1216595 | | | | | | |
| AD- | uscsugguCfcUfUfUfuuggucgagaL96 | 1779 | VPusCfsucgAfcCfAfaaaaGfgAfccagasasc | 1851 | GUUCUGGUCCUUUUUGGUCGAGG | 1905 |
| 1216596 | | | | | | |
| AD- | csusggucCfuUfUfUfuggucgaggaL96 | 1780 | VPusCfscucGfaCfCfaaaaAfgGfaccagsasa | 1852 | UUCUGGUCCUUUUUGGUCGAGGA | 1906 |
| 1216597 | | | | | | |
| AD- | gsasggagUfaAfCfAfauacaaaugaL96 | 1781 | VPusCfsauuUfgUfAfuuguUfaCfuccucsgsa | 1853 | UCGAGGAGUAACAAUACAAAUGG | 1907 |
| 1216613 | | | | | | |
| AD- | asusggugUfaGfAfAfcacuaauucaL96 | 1782 | VPusGfsaauUfaGfUfguucUfaCfaccaususa | 1854 | UAAUGGUGUAGAACACUAAUUCA | 1522 |
| 1216784 | | | | | | |
| AD- | gsgsuguaGfaAfCfAfcuaauucauaL96 | 1783 | VPusAfsugaAfuUfAfguguUfcUfacaccsasu | 1855 | AUGGUGUAGAACACUAAUUCAUA | 1524 |
| 1216786 | | | | | | |
| AD- | gsusguagAfaCfAfCfuaauucauaaL96 | 1784 | VPusUfsaugAfaUfUfagugUfuCfuacacscsa | 1856 | UGGUGUAGAACACUAAUUCAUAA | 1525 |
| 1216787 | | | | | | |
| AD- | usasgaacAfcUfAfAfuucauaaucaL96 | 1785 | VPusGfsauuAfuGfAfauuaGfuGfuucuascsa | 1857 | UGUAGAACACUAAUUCAUAAUCA | 1528 |
| 1216790 | | | | | | |
| AD- | gsasacacUfaAfUfUfcauaaucacaL96 | 1786 | VPusGfsugaUfuAfUfgaauUfaGfuguucsusa | 1858 | UAGAACACUAAUUCAUAAUCACU | 1530 |
| 1216792 | | | | | | |
| AD- | usgscuuaAfaAfUfAfagcagguggaL96 | 1787 | VPusCfscacCfuGfCfuuauUfuUfaagcasusa | 1859 | UAUGCUUAAAAUAAGCAGGUGGA | 1908 |
| 1216895 | | | | | | |
| AD- | usasagcaGfgUfGfGfaucuauuucaL96 | 1788 | VPusGfsaaaUfaGfAfuccaCfcUfgcuuasusu | 1860 | AAUAAGCAGGUGGAUCUAUUUCA | 1909 |
| 1216904 | | | | | | |
| AD- | asgscaggUfgGfAfUfcuauuucauaL96 | 1789 | VPusAfsugaAfaUfAfgaucCfaCfcugcususa | 1861 | UAAGCAGGUGGAUCUAUUUCAUG | 1910 |
| 1216906 | | | | | | |
| AD- | gscsagguGfgAfUfCfuauuucaugaL96 | 1790 | VPusCfsaugAfaAfUfagauCfcAfccugcsusu | 1862 | AAGCAGGUGGAUCUAUUUCAUGU | 1911 |
| 1216907 | | | | | | |
| AD- | gsgsuggaUfcUfAfUfuucauguuuaL96 | 1791 | VPusAfsaacAfuGfAfaauaGfaUfccaccsusg | 1863 | CAGGUGGAUCUAUUUCAUGUUUU | 1912 |
| 1216910 | | | | | | |
| AD- | gsusggauCfuAfUfUfucauguuuuaL96 | 1792 | VPusAfsaaaCfaUfGfaaauAfgAfuccacscsu | 1864 | AGGUGGAUCUAUUUCAUGUUUUU | 1913 |
| 1216911 | | | | | | |
| AD- | gsgsaucuAfuUfUfCfauguuuuugaL96 | 1793 | VPusCfsaaaAfaCfAfugaaAfuAfgauccsasc | 1865 | GUGGAUCUAUUUCAUGUUUUUGA | 1914 |
| 1216913 | | | | | | |
| AD- | gsgsguagGfgUfAfAfaucaguaagaL96 | 1794 | VPusCfsuuaCfuGfAfuuuaCfcCfuacccsasu | 1866 | AUGGGUAGGGUAAAUCAGUAAGA | 1915 |
| 1216938 | | | | | | |
| AD- | gsusagggUfaAfAfUfcaguaagagaL96 | 1795 | VPusCfsucuUfaCfUfgauuUfaCfccuacscsc | 1867 | GGGUAGGGUAAAUCAGUAAGAGG | 1536 |
| 1216940 | | | | | | |
| AD- | usasggguAfaAfUfCfaguaagaggaL96 | 1796 | VPusCfscucUfuAfCfugauUfuAfcccuascsc | 1868 | GGUAGGGUAAAUCAGUAAGAGGU | 1916 |
| 1216941 | | | | | | |
| AD- | asgsgguaAfaUfCfAfguaagagguaL96 | 1797 | VPusAfsccuCfuUfAfcugaUfuUfacccusasc | 1869 | GUAGGGUAAAUCAGUAAGAGGUG | 1537 |
| 1216942 | | | | | | |
| AD- | gsgsuaaaUfcAfGfUfaagagguguaL96 | 1798 | VPusAfscacCfuCfUfuacuGfaUfuuaccscsu | 1870 | AGGGUAAAUCAGUAAGAGGUGUU | 1917 |
| 1216944 | | | | | | |
| AD- | gsusaaauCfaGfUfAfagagguguuaL96 | 1799 | VPusAfsacaCfcUfCfuuacUfgAfuuuacscsc | 1871 | GGGUAAAUCAGUAAGAGGUGUUA | 1539 |
| 1216945 | | | | | | |
| AD- | ususaccaGfuUfGfCfcuuuuauccaL96 | 1800 | VPusGfsgauAfaAfAfggcaAfcUfgguaasasc | 1872 | GUUUACCAGUUGCCUUUUAUCCC | 1918 |
| 1216989 | | | | | | |
| AD- | usasccagUfuGfCfCfuuuuaucccaL96 | 1801 | VPusGfsggaUfaAfAfaggcAfaCfugguasasa | 1873 | UUUACCAGUUGCCUUUUAUCCCA | 1919 |
| 1216990 | | | | | | |
| AD- | usasucccAfaAfGfUfuguuguaacaL96 | 1802 | VPusGfsuuaCfaAfCfaacuUfuGfggauasasa | 1874 | UUUAUCCCAAAGUUGUUGUAACC | 1920 |
| 1217004 | | | | | | |
| AD- | cscscaaaGfuUfGfUfuguaaccugaL96 | 1803 | VPusCfsaggUfuAfCfaacaAfcUfuugggsasu | 1875 | AUCCCAAAGUUGUUGUAACCUGC | 1921 |
| 1217007 | | | | | | |
| AD- | usascuguUfgGfAfUfugauucgaaaL96 | 1804 | VPusUfsucgAfaUfCfaaucCfaAfcaguasgsc | 1876 | GCUACUGUUGGAUUGAUUCGAAA | 1433 |
| 70947 | | | | | | |

TABLE 7
Single Dose Screens in Hep3b Cells

| | Avg | | Avg | | Avg | |
|---|---|---|---|---|---|---|
| Duplex | 10 nM | SD | 1 nM | SD | 0.1 nM | SD |
| AD-70947 | 11.5 | 1.8 | 22.32 | 1.27 | 44.29 | 2.41 |
| AD-1216613 | 16.7 | 3.2 | 22.86 | 1.17 | 45.84 | 1.90 |
| AD-1214765 | 16.0 | 2.7 | 26.93 | 7.66 | 46.32 | 4.90 |
| AD-70947 | 9.5 | 2.0 | 22.89 | 2.32 | 46.86 | 5.57 |
| AD-1216904 | 19.6 | 1.7 | 33.00 | 4.75 | 55.35 | 1.63 |
| AD-1211676 | 16.3 | 1.8 | 28.31 | 2.58 | 55.61 | 3.66 |
| AD-1214770 | 14.7 | 3.3 | 27.87 | 2.51 | 55.97 | 3.06 |
| AD-1216784 | 11.8 | 0.9 | 28.35 | 2.48 | 57.01 | 2.10 |
| AD-1211065 | 25.9 | 12.7 | 37.93 | 15.20 | 57.44 | 2.20 |
| AD-1216910 | 20.9 | 2.5 | 33.63 | 2.51 | 57.90 | 6.75 |
| AD-1211064 | 16.1 | 2.9 | 32.53 | 3.90 | 58.39 | 1.17 |
| AD-1213113 | 16.3 | 2.9 | 30.68 | 1.07 | 60.99 | 6.32 |
| AD-1216790 | 17.9 | 4.1 | 35.54 | 2.50 | 61.19 | 1.44 |
| AD-1216911 | 23.9 | 2.2 | 41.70 | 5.24 | 64.07 | 3.50 |
| AD-1216792 | 21.3 | 1.9 | 39.55 | 4.48 | 65.87 | 3.48 |
| AD-1216787 | 20.8 | 1.9 | 45.87 | 1.90 | 67.18 | 8.76 |
| AD-1212720 | 20.0 | 5.4 | 42.28 | 5.20 | 67.21 | 2.28 |
| AD-1216790 | 23.2 | 2.2 | 36.54 | 4.30 | 67.25 | 5.88 |
| AD-1216913 | 20.9 | 1.6 | 39.18 | 6.07 | 68.42 | 5.84 |
| AD-1212720 | 19.2 | 2.1 | 46.19 | 3.61 | 68.98 | 8.77 |
| AD-1216792 | 20.8 | 3.0 | 36.61 | 6.33 | 69.00 | 7.37 |
| AD-1213116 | 25.2 | 2.1 | 42.65 | 5.17 | 69.14 | 3.63 |
| AD-1214768 | 22.3 | 1.5 | 34.43 | 3.82 | 69.90 | 4.53 |
| AD-1213112 | 25.8 | 6.7 | 37.46 | 5.52 | 70.27 | 6.74 |
| AD-1216597 | 41.0 | 2.9 | 57.74 | 5.54 | 70.35 | 3.58 |
| AD-1216945 | 24.4 | 1.4 | 40.98 | 3.24 | 71.68 | 7.48 |
| AD-1216556 | 39.6 | 3.8 | 51.67 | 4.94 | 72.05 | 3.10 |
| AD-1216593 | 46.8 | 1.6 | 53.51 | 1.69 | 73.22 | 4.02 |
| AD-1211675 | 21.8 | 2.6 | 46.93 | 5.04 | 73.29 | 5.65 |
| AD-1216546 | 48.5 | 3.8 | 50.31 | 6.67 | 73.33 | 3.69 |
| AD-1210479 | 21.7 | 2.1 | 41.58 | 3.60 | 73.56 | 2.79 |
| AD-1216528 | 45.2 | 0.8 | 53.03 | 7.55 | 73.66 | 5.25 |
| AD-1213749 | 24.9 | 3.0 | 41.47 | 2.95 | 73.82 | 2.96 |
| AD-1216593 | 37.8 | 1.5 | 57.64 | 1.50 | 74.01 | 4.82 |
| AD-1213118 | 23.9 | 2.0 | 40.28 | 1.63 | 74.06 | 9.20 |
| AD-1216526 | 40.6 | 4.2 | 58.15 | 4.28 | 74.31 | 5.60 |
| AD-1216907 | 20.3 | 1.5 | 44.23 | 1.79 | 75.29 | 6.79 |
| AD-1216525 | 45.5 | 2.8 | 54.02 | 6.07 | 75.48 | 2.48 |
| AD-1216990 | 35.0 | 3.2 | 53.14 | 1.71 | 75.92 | 6.54 |
| AD-1213116 | 28.5 | 4.2 | 48.54 | 3.25 | 76.12 | 5.40 |
| AD-1216594 | 45.7 | 8.6 | 53.08 | 4.53 | 76.37 | 8.88 |
| AD-1211677 | 18.5 | 2.2 | 37.22 | 4.04 | 77.49 | 6.22 |
| AD-1216940 | 29.4 | 5.5 | 49.40 | 3.49 | 77.55 | 4.88 |
| AD-1216595 | 45.6 | 2.2 | 59.98 | 4.33 | 78.30 | 6.20 |
| AD-1216594 | 43.7 | 2.7 | 52.17 | 5.56 | 78.38 | 9.40 |
| AD-1216131 | 29.4 | 4.5 | 40.22 | 5.08 | 78.57 | 3.24 |
| AD-1216942 | 27.5 | 5.1 | 50.47 | 2.40 | 78.95 | 7.99 |
| AD-1216559 | 47.5 | 3.5 | 58.31 | 5.29 | 79.57 | 4.34 |
| AD-1210480 | 27.4 | 1.4 | 55.25 | 6.03 | 80.03 | 7.65 |
| AD-1213115 | 21.8 | 1.8 | 50.16 | 8.38 | 80.29 | 7.30 |
| AD-1216786 | 29.8 | 3.2 | 49.96 | 7.35 | 81.03 | 9.54 |
| AD-1216895 | 26.5 | 2.6 | 52.63 | 5.98 | 81.50 | 11.93 |
| AD-1216132 | 34.0 | 5.1 | 49.52 | 2.35 | 81.50 | 3.94 |
| AD-1216596 | 43.8 | 1.7 | 60.51 | 7.52 | 81.59 | 2.06 |
| AD-1216906 | 31.6 | 2.9 | 51.31 | 7.1. | 81.65 | 4.04 |
| AD-1210732 | 27.5 | 0.7 | 55.20 | 5.63 | 82.56 | 11.46 |
| AD-1216989 | 29.2 | 2.9 | 50.63 | 3.85 | 82.99 | 5.31 |
| AD-1217004 | 29.5 | 3.0 | 53.78 | 3.96 | 83.37 | 7.09 |
| AD-1216592 | 56.6 | 2.7 | 65.11 | 5.53 | 83.40 | 5.10 |
| AD-1216941 | 39.4 | 4.4 | 62.94 | 4.12 | 83.43 | 0.29 |
| AD-1212721 | 54.0 | 6.9 | 65.65 | 8.12 | 83.48 | 3.38 |
| AD-1216561 | 48.4 | 4.4 | 63.17 | 7.36 | 83.52 | 9.05 |
| AD-1216506 | 46.0 | 1.9 | 56.58 | 2.41 | 83.91 | 3.34 |
| AD-1216596 | 47.9 | 2.8 | 61.91 | 2.53 | 84.41 | 7.38 |
| AD-1213119 | 34.2 | 2.7 | 60.89 | 5.55 | 85.22 | 6.55 |
| AD-1216560 | 52.4 | 6.1 | 60.41 | 1.71 | 85.93 | 1.24 |
| AD-1215018 | 28.4 | 3.1 | 51.14 | 6.12 | 86.11 | 2.76 |
| AD-1216595 | 54.3 | 5.3 | 63.21 | 5.04 | 86.30 | 9.38 |
| AD-1216349 | 41.1 | 2.3 | 64.12 | 7.16 | 86.49 | 5.12 |
| AD-1215017 | 42.1 | 3.4 | 61.25 | 4.57 | 86.93 | 4.89 |
| AD-1212721 | 52.4 | 2.6 | 70.04 | 5.96 | 86.98 | 5.97 |
| AD-1217007 | 41.0 | 3.4 | 61.63 | 5.54 | 87.47 | 8.88 |
| AD-1217007 | 39.5 | 3.3 | 66.47 | 2.70 | 87.52 | 4.62 |
| AD-1216350 | 42.5 | 0.8 | 65.23 | 5.55 | 87.58 | 8.36 |
| AD-1216938 | 43.4 | 5.9 | 58.25 | 4.31 | 87.74 | 1.60 |
| AD-1216944 | 47.0 | 5.4 | 64.14 | 3.95 | 87.75 | 2.03 |
| AD-1216560 | 57.5 | 2.0 | 78.55 | 10.47 | 88.32 | 5.75 |
| AD-1216345 | 28.2 | 3.2 | 54.21 | 5.91 | 88.89 | 11.42 |
| AD-1216558 | 52.0 | 2.9 | 66.25 | 12.01 | 90.56 | 3.45 |
| AD-1211582 | 40.8 | 4.1 | 68.58 | 7.37 | 90.76 | 4.63 |
| AD-1210734 | 66.0 | 8.0 | 75.91 | 5.09 | 92.38 | 5.61 |
| AD-1210734 | 56.8 | 1.9 | 83.84 | 6.72 | 93.89 | 2.46 |
| AD-1211578 | 81.4 | 6.2 | 91.70 | 1.40 | 96.01 | 0.86 |
| AD-1213117 | 41.0 | 7.4 | 65.32 | 9.19 | 97.54 | 7.35 |
| AD-1216352 | 44.5 | 3.0 | 71.22 | 7.34 | 98.29 | 10.71 |

### Example 4. in Vivo Assessment of CTNNB1 siRNAs in Non-Human Primates

[0819] Duplexes identified from the above in vitro analyses were assessed for their ability to inhibit CTNNB1 expression in vivo. Briefly, duplexes were formulated in lipid particles comprising a biodegradable lipid, e.g., cationic lipid and intravenously administered to non-human primates.

[0820] In particular, duplexes AD-167990 (Negative Control), AD-1548393, AD-1548488, and AD-1548459 were combined with a cationic lipid having the structure below and DSPC/Chol/PEG-DMG in a ratio of 50:12:36:2, respectively.

[chemical structure]

[0821] At Day −10 pre-dose, percutaneous needle liver biopsies were obtained and the level of CTNNB1 mRNA was determined as described above.

[0822] At Day 0, cynomolgus monkeys were intravenously administered a single 0.1 mg/kg or 0.3 mg/kg dose of the lipid formulated duplex and at Days 5, 15, and 29, percutaneous needle liver biopsies were obtained and the level of CTNNB1 mRNA was determined as described above. The study design is provided in Table 8 below.

[0823] As shown in FIGS. 1A-1C, all three duplexes potently inhibit CTNNB1 expression at 0.1 mg/kg and 0.3 mg/kg.

TABLE 8
Study Design

| | | | | | | Dose | |
|---|---|---|---|---|---|---|---|
| | | | | Dose | Dose | Level | Bi- |
| Group | SIRNA | LNP | N | Route | Day | (mg/kg) | opsies |
| 1 | AD-167990 | 50/12/36/2 | 3 | IV | Day 1 | 0.3 | Pre- |
| | (Negative | (AF-105) | | | | | dose |
| | Control) | | | | | | |
| 2 | AD-1548393.1 | AF-105 | 3 | IV | | 0.1 | Day 5 |
| 3 | AD-1548393.1 | AF-105 | 3 | IV | | 0.3 | Day 15 |
| 4 | AD-1548488.1 | AF-105 | 3 | IV | | 0.1 | Day 29 |
| 5 | AD-1548488.1 | AF-105 | 3 | IV | | 0.3 | |
| 6 | AD-1548459.1 | AF-105 | 3 | IV | | 0.1 | |
| 7 | AD-1548459.1 | AF-105 | 3 | IV | | 0.3 | |

### EQUIVALENTS

[0824] Those skilled in the art will recognize, or be able to ascertain using no more than routine experimentation, many equivalents to the specific embodiments and methods described herein. Such equivalents are intended to be encompassed by the scope of the following claims.

The application's sequence listing, which the Patent Office published only in electronic form, follows.

SEQUENCE LISTING (1921 sequences)

SEQ ID NO: 1 - DNA, 3661 bp, Homo sapiens
  source 1..3661: mol_type = genomic DNA
aagcctctcggtctgtggcagcagcgttggcccggccccgggagcggagagcgaggggaggcggagacggaggaaggtctgaggagcagcttcagtccccgccgagccgccaccgcaggtcgaggacggtcggactcccgcggcgggaggagcctgttcccctgagggtatttgaagtataccatacaactgttttgaaaatccagcgtggacaatggctactcaagctgatttgatggagttggacatggccatggaaccagacagaaaagcggctgttagtcactggcagcaacagtcttacctggactctggaatccattctggtgccactaccacagctccttctctgagtggtaaaggcaatcctgaggaagaggatgtggatacctcccaagtcctgtatgagtgggaacagggattttctcagtccttcactcaagaacaagtagctgatattgatggacagtatgcaatgactcgagctcagagggtacgagctgctatgttccctgagacattagatgagggcatgcagatcccatctacacagtttgatgctgctcatcccactaatgtccagcgtttggctgaaccatcacagatgctgaaacatgcagttgtaaacttgattaactatcaagatgatgcagaacttgccacacgtgcaatccctgaactgacaaaactgctaaatgacgaggaccaggtggtggttaataaggctgcagttatggtccatcagctttctaaaaaggaagcttccagacacgctatcatgcgttctcctcagatggtgtctgctattgtacgtaccatgcagaatacaaatgatgtagaaacagctcgttgtaccgctgggaccttgcataacctttcccatcatcgtgagggcttactggccatctttaagtctggaggcattcctgccctggtgaaaatgcttggttcaccagtggattctgtgttgttttatgccattacaactctccacaaccttttattacatcaagaaggagctaaaatggcagtgcgtttagctggtgggctgcagaaaatggttgccttgctcaacaaaacaaatgttaaattcttggctattacgacagactgccttcaaattttagcttatggcaaccaagaaagcaagctcatcatactggctagtggtggaccccaagctttagtaaatataatgaggacctatacttacgaaaaactactgtggaccacaagcagagtgctgaaggtgctatctgtctgctctagtaataagccggctattgtagaagctggtggaatgcaagctttaggacttcacctgacagatccaagtcaacgtcttgttcagaactgtctttggactctcaggaatctttcagatgctgcaactaaacaggaagggatggaaggtctccttgggactcttgttcagcttctgggttcagatgatataaatgtggtcacctgtgcagctggaattctttctaacctcacttgcaataattataagaacaagatgatggtctgccaagtgggtggtatagaggctcttgtgcgtactgtccttcgggctggtgacagggaagacatcactgagcctgccatctgtgctcttcgtcatctgaccagccgacaccaagaagcagagatggcccagaatgcagttcgccttcactatggactaccagttgtggttaagctcttacacccaccatcccactggcctctgataaaggctactgttggattgattcgaaatcttgccctttgtcccgcaaatcatgcacctttgcgtgagcagggtgccattccacgactagttcagttgcttgttcgtgcacatcaggatacccagcgccgtacgtccatgggtgggacacagcagcaatttgtggagggggtccgcatggaagaaatagttgaaggttgtaccggagcccttcacatcctagctcgggatgttcacaaccgaattgttatcagaggactaaataccattccattgtttgtgcagctgctttattctcccattgaaaacatccaaagagtagctgcaggggtcctctgtgaacttgctcaggacaaggaagctgcagaagctattgaagctgagggagccacagctcctctgacagagttacttcactctaggaatgaaggtgtggcgacatatgcagctgctgttttgttccgaatgtctgaggacaagccacaagattacaagaaacggctttcagttgagctgaccagctctctcttcagaacagagccaatggcttggaatgagactgctgatcttggacttgatattggtgcccagggagaaccccttggatatcgccaggatgatcctagctatcgttcttttcactctggtggatatggccaggatgccttgggtatggaccccatgatggaacatgagatgggtggccaccaccctggtgctgactatccagttgatgggctgccagatctggggcatgcccaggacctcatggatgggctgcctccaggtgacagcaatcagctggcctggtttgatactgacctgtaaatcatcctttaggtaagaagttttaaaaagccagtttgggtaaaatacttttactctgcctacagaacttcagaaagacttggttggtagggtgggagtggtttaggctatttgtaaatctgccacaaaaacaggtatatactttgaaaggagatgtcttggaacattggaatgttctcagatttctggttgttatgtgatcatgtgtggaagttattaactttaatgttttttgccacagcttttgcaacttaatactcaaatgagtaacatttgctgttttaaacattaatagcagcctttctctctttatacagctgtattgtctgaacttgcattgtgattggcctgtagagttgctgagagggctcgaggggtgggctggtatctcagaaagtgcctgacacactaaccaagctgagtttcctatgggaacaattgaagtaaactttttgttctggtcctttttggtcgaggagtaacaatacaaatggattttgggagtgactcaagaagtgaagaatgcacaagaatggatcacaagatggaatttatcaaaccctagccttgcttgttaaatttttttttttttttttttaagaatatctgtaatggtactgactttgcttgctttgaagtagctctttttttttttttttttttttttttgcagtaactgttttttaagtctctcgtagtgttaagttatagtgaatactgctacagcaatttctaatttttaagaattgagtaatggtgtagaacactaattcataatcactctaattaattgtaatctgaataaagtgtaacaattgtgtagcctttttgtataaaatagacaaatagaaaatggtccaattagtttcctttttaatatgcttaaaataagcaggtggatctatttcatgtttttgatcaaaaactatttgggatatgtatgggtagggtaaatcagtaagaggtgttatttggaaccttgttttggacagtttaccagttgccttttatcccaaagttgttgtaacctgctgtgatacgatgcttcaagagaaaatgcggttataaaaaatggttcagaattaaacttttaattcattc

SEQ ID NO: 2 - DNA, 3661 bp, Homo sapiens
  source 1..3661: mol_type = genomic DNA
gaatgaattaaaagtttaattctgaaccattttttataaccgcattttctcttgaagcatcgtatcacagcaggttacaacaactttgggataaaaggcaactggtaaactgtccaaaacaaggttccaaataacacctcttactgatttaccctacccatacatatcccaaatagtttttgatcaaaaacatgaaatagatccacctgcttattttaagcatattaaaaaggaaactaattggaccattttctatttgtctattttatacaaaaaggctacacaattgttacactttattcagattacaattaattagagtgattatgaattagtgttctacaccattactcaattcttaaaaattagaaattgctgtagcagtattcactataacttaacactacgagagacttaaaaaacagttactgcaaaaaaaaaaaaaaaaaaaaaaaaagagctacttcaaagcaagcaaagtcagtaccattacagatattcttaaaaaaaaaaaaaaaaaaatttaacaagcaaggctagggtttgataaattccatcttgtgatccattcttgtgcattcttcacttcttgagtcactcccaaaatccatttgtattgttactcctcgaccaaaaaggaccagaacaaaaagtttacttcaattgttcccataggaaactcagcttggttagtgtgtcaggcactttctgagataccagcccacccctcgagccctctcagcaactctacaggccaatcacaatgcaagttcagacaatacagctgtataaagagagaaaggctgctattaatgtttaaaacagcaaatgttactcatttgagtattaagttgcaaaagctgtggcaaaaaacattaaagttaataacttccacacatgatcacataacaaccagaaatctgagaacattccaatgttccaagacatctcctttcaaagtatatacctgtttttgtggcagatttacaaatagcctaaaccactcccaccctaccaaccaagtctttctgaagttctgtaggcagagtaaaagtattttacccaaactggctttttaaaacttcttacctaaaggatgatttacaggtcagtatcaaaccaggccagctgattgctgtcacctggaggcagcccatccatgaggtcctgggcatgccccagatctggcagcccatcaactggatagtcagcaccagggtggtggccacccatctcatgttccatcatggggtccatacccaaggcatcctggccatatccaccagagtgaaaagaacgatagctaggatcatcctggcgatatccaaggggttctccctgggcaccaatatcaagtccaagatcagcagtctcattccaagccattggctctgttctgaagagagagctggtcagctcaactgaaagccgtttcttgtaatcttgtggcttgtcctcagacattcggaacaaaacagcagctgcatatgtcgccacaccttcattcctagagtgaagtaactctgtcagaggagctgtggctccctcagcttcaatagcttctgcagcttccttgtcctgagcaagttcacagaggacccctgcagctactctttggatgttttcaatgggagaataaagcagctgcacaaacaatggaatggtatttagtcctctgataacaattcggttgtgaacatcccgagctaggatgtgaagggctccggtacaaccttcaactatttcttccatgcggaccccctccacaaattgctgctgtgtcccacccatggacgtacggcgctgggtatcctgatgtgcacgaacaagcaactgaactagtcgtggaatggcaccctgctcacgcaaaggtgcatgatttgcgggacaaagggcaagatttcgaatcaatccaacagtagcctttatcagaggccagtgggatggtgggtgtaagagcttaaccacaactggtagtccatagtgaaggcgaactgcattctgggccatctctgcttcttggtgtcggctggtcagatgacgaagagcacagatggcaggctcagtgatgtcttccctgtcaccagcccgaaggacagtacgcacaagagcctctataccacccacttggcagaccatcatcttgttcttataattattgcaagtgaggttagaaagaattccagctgcacaggtgaccacatttatatcatctgaacccagaagctgaacaagagtcccaaggagaccttccatcccttcctgtttagttgcagcatctgaaagattcctgagagtccaaagacagttctgaacaagacgttgacttggatctgtcaggtgaagtcctaaagcttgcattccaccagcttctacaatagccggcttattactagagcagacagatagcaccttcagcactctgcttgtggtccacagtagtttttcgtaagtataggtcctcattatatttactaaagcttggggtccaccactagccagtatgatgagcttgctttcttggttgccataagctaaaatttgaaggcagtctgtcgtaatagccaagaatttaacatttgttttgttgagcaaggcaaccattttctgcagcccaccagctaaacgcactgccattttagctccttcttgatgtaataaaaggttgtggagagttgtaatggcataaaacaacacagaatccactggtgaaccaagcattttcaccagggcaggaatgcctccagacttaaagatggccagtaagccctcacgatgatgggaaaggttatgcaaggtcccagcggtacaacgagctgtttctacatcatttgtattctgcatggtacgtacaatagcagacaccatctgaggagaacgcatgatagcgtgtctggaagcttcctttttagaaagctgatggaccataactgcagccttattaaccaccacctggtcctcgtcatttagcagttttgtcagttcagggattgcacgtgtggcaagttctgcatcatcttgatagttaatcaagtttacaactgcatgtttcagcatctgtgatggttcagccaaacgctggacattagtgggatgagcagcatcaaactgtgtagatgggatctgcatgccctcatctaatgtctcagggaacatagcagctcgtaccctctgagctcgagtcattgcatactgtccatcaatatcagctacttgttcttgagtgaaggactgagaaaatccctgttcccactcatacaggacttgggaggtatccacatcctcttcctcaggattgcctttaccactcagagaaggagctgtggtagtggcaccagaatggattccagagtccaggtaagactgttgctgccagtgactaacagccgcttttctgtctggttccatggccatgtccaactccatcaaatcagcttgagtagccattgtccacgctggattttcaaaacagttgtatggtatacttcaaataccctcaggggaacaggctcctcccgccgcgggagtccgaccgtcctcgacctgcggtggcggctcggcggggactgaagctgctcctcagaccttcctccgtctccgcctcccctcgctctccgctcccggggccgggccaacgctgctgccacagaccgagaggctt

SEQ ID NO: 3 - DNA, 3640 bp, Mus musculus
  source 1..3640: mol_type = genomic DNA
gcgcggcggaacgctccgcgcggagcggcagcggcaggatacacggtgccgcgccgcttataaatcgctccttgtgcggcgccatcttaagccctcgctcggtggcggccgcgtcagctcgtgtcctgtgaagcccgcggcccggggaggcggagacggagcacggtgggcgccgagccgtcagtgcaggaggccgaggccgagcgggcggccgcgagtgagcagcgcgcgggcctgagggtacctgaagctcagcgcacagctgctgtgacaccgctgcgtggacaatggctactcaagctgacctgatggagttggacatggccatggagccggacagaaaagctgctgtcagccactggcagcagcagtcttacttggattctggaatccattctggtgccaccaccacagctccttccctgagtggcaagggcaaccctgaggaagaagatgttgacacctcccaagtcctttatgaatgggagcaaggcttttcccagtccttcacgcaagagcaagtagctgatattgacgggcagtatgcaatgactagggctcagagggtccgagctgccatgttccctgagacgctagatgagggcatgcagatcccatccacgcagtttgacgctgctcatcccactaatgtccagcgcttggctgaaccatcacagatgttgaaacatgcagttgtcaatttgattaactatcaggatgacgcggaacttgccacacgtgcaattcctgagctgacaaaactgctaaacgatgaggaccaggtggtagttaataaagctgctgttatggtccatcagctttccaaaaaggaagcttccagacatgccatcatgcgctcccctcagatggtgtctgccattgtacgcaccatgcagaatacaaatgatgtagagacagctcgttgtactgctgggactctgcacaacctttctcaccaccgcgagggcttgctggccatctttaagtctggtggcatcccagcgctggtgaaaatgcttgggtcaccagtggattctgtactgttctacgccatcacgacactgcataatctcctgctccatcaggaaggagctaaaatggcagtgcgcctagctggtggactgcagaaaatggttgctttgctcaacaaaacaaacgtgaaattcttggctattacaacagactgccttcagatcttagcttatggcaatcaagagagcaagctcatcattctggccagtggtggaccccaagccttagtaaacataatgaggacctacacttatgagaagcttctgtggaccacaagcagagtgctgaaggtgctgtctgtctgctctagcaacaagccggccattgtagaagctggtgggatgcaggcactggggcttcatctgacagacccaagtcagcgacttgttcaaaactgtctttggactctcagaaacctttcagatgcagcgactaagcaggaagggatggaaggcctccttgggactctagtgcagcttctgggttccgatgatataaatgtggtcacctgtgcagctggaattctctctaacctcacttgcaataattacaaaaacaagatgatggtgtgccaagtgggtggcatagaggctcttgtacgcaccgtccttcgtgctggtgacagggaagacatcactgagcctgccatctgtgctcttcgtcatctgaccagccggcatcaggaagccgagatggcccagaatgccgttcgccttcattatggactgcctgttgtggttaaactcctgcacccaccatcccactggcctctgataaaggcaactgttggattgattcgaaaccttgccctttgcccagcaaatcatgcgcctttgcgggaacagggtgctattccacgactagttcagctgcttgtacgagcacatcaggacacccaacggcgcacctccatgggtggaacgcagcagcagtttgtggagggcgtgcgcatggaggagatagtagaagggtgtactggagctctccacatccttgctcgggacgttcacaaccggattgtaatccgaggactcaataccattccattgtttgtgcagttgctttattctcccattgaaaatatccaaagagtagctgcaggggtcctctgtgaacttgctcaggacaaggaggctgcagaggccattgaagctgagggagccacagctcccctgacagagttactccactccaggaatgaaggcgtggcaacatacgcagctgctgtcctattccgaatgtctgaggacaagccacaggattacaagaagcggctttcagtcgagctgaccagttccctcttcaggacagagccaatggcttggaatgagactgcagatcttggactggacattggtgcccagggagaagcccttggatatcgccaggatgatcccagctaccgttcttttcactctggtggatacggccaggatgccttggggatggaccctatgatggagcatgagatgggtggccaccaccctggtgctgactatccagttgatgggctgcctgatctgggacacgcccaggacctcatggatgggctgcccccaggtgatagcaatcagctggcctggtttgatactgacctgtaaatcgtcctttaggtaagaaagcttataaaagccagtgtgggtgaatactttactctgcctgcagaactccagaaagacttggtagggtgggaatggttttaggcctgtttgtaaatctgccaccaaacagatacataccttggaaggagatgttcatgtgtggaagtttctcacgttgatgtttttgccacagcttttgcagcgttatactcagatgagtaacatttgctgttttcaacattaatagcagcctttctctctatacagctgtagtgtctgaacgtgcattgtgattggcctgtagagttgctgagagggctcgaggggtgggctggtatctcagaaagtgcctgacacactaaccaagctgagtttcctatgggaacagtcgaagtacgctttttgttctggtcctttttggtcgaggagtaacaatacaaatggatttggggagtgactcacgcagtgaagaatgcacacgaatggatcacaagatggcgttatcaaaccctagccttgcttgttctttgttttaatatctgtagtggtgctgactttgcttgcttttattttttgcagtaactgttagtttttaagtagtgttatgttctagtgaacctgctacagcaatttctgatttctaagaaccgagtaatggtgtagaacactaattcataatcacgctaattgtaatctggagacgtgtaacattgtgtagccttttgtataaatagacagatagaaatggtccgattagtttcctttttaatatgcttaaaataagcaggtggatctatttcatgtttttgaacaaaaactttatcggggatacgtgcggtagggtaaatcagtaagaggtgttatttgagccttgttttggacagtataccagttgccttttatcccaaagttgttgtaacctgctgtgatacaatgcttcaacagatgcggttatagaaatggttcagaattaaacttttaattcattcaaaaaaaaaaaaaaaaaa

SEQ ID NO: 4 - DNA, 3640 bp, Mus musculus
  source 1..3640: mol_type = genomic DNA
ttttttttttttttttttgaatgaattaaaagtttaattctgaaccatttctataaccgcatctgttgaagcattgtatcacagcaggttacaacaactttgggataaaaggcaactggtatactgtccaaaacaaggctcaaataacacctcttactgatttaccctaccgcacgtatccccgataaagtttttgttcaaaaacatgaaatagatccacctgcttattttaagcatattaaaaaggaaactaatcggaccatttctatctgtctatttatacaaaaggctacacaatgttacacgtctccagattacaattagcgtgattatgaattagtgttctacaccattactcggttcttagaaatcagaaattgctgtagcaggttcactagaacataacactacttaaaaactaacagttactgcaaaaaataaaagcaagcaaagtcagcaccactacagatattaaaacaaagaacaagcaaggctagggtttgataacgccatcttgtgatccattcgtgtgcattcttcactgcgtgagtcactccccaaatccatttgtattgttactcctcgaccaaaaaggaccagaacaaaaagcgtacttcgactgttcccataggaaactcagcttggttagtgtgtcaggcactttctgagataccagcccacccctcgagccctctcagcaactctacaggccaatcacaatgcacgttcagacactacagctgtatagagagaaaggctgctattaatgttgaaaacagcaaatgttactcatctgagtataacgctgcaaaagctgtggcaaaaacatcaacgtgagaaacttccacacatgaacatctccttccaaggtatgtatctgtttggtggcagatttacaaacaggcctaaaaccattcccaccctaccaagtctttctggagttctgcaggcagagtaaagtattcacccacactggcttttataagctttcttacctaaaggacgatttacaggtcagtatcaaaccaggccagctgattgctatcacctgggggcagcccatccatgaggtcctgggcgtgtcccagatcaggcagcccatcaactggatagtcagcaccagggtggtggccacccatctcatgctccatcatagggtccatccccaaggcatcctggccgtatccaccagagtgaaaagaacggtagctgggatcatcctggcgatatccaagggcttctccctgggcaccaatgtccagtccaagatctgcagtctcattccaagccattggctctgtcctgaagagggaactggtcagctcgactgaaagccgcttcttgtaatcctgtggcttgtcctcagacattcggaataggacagcagctgcgtatgttgccacgccttcattcctggagtggagtaactctgtcaggggagctgtggctccctcagcttcaatggcctctgcagcctccttgtcctgagcaagttcacagaggacccctgcagctactctttggatattttcaatgggagaataaagcaactgcacaaacaatggaatggtattgagtcctcggattacaatccggttgtgaacgtcccgagcaaggatgtggagagctccagtacacccttctactatctcctccatgcgcacgccctccacaaactgctgctgcgttccacccatggaggtgcgccgttgggtgtcctgatgtgctcgtacaagcagctgaactagtcgtggaatagcaccctgttcccgcaaaggcgcatgatttgctgggcaaagggcaaggtttcgaatcaatccaacagttgcctttatcagaggccagtgggatggtgggtgcaggagtttaaccacaacaggcagtccataatgaaggcgaacggcattctgggccatctcggcttcctgatgccggctggtcagatgacgaagagcacagatggcaggctcagtgatgtcttccctgtcaccagcacgaaggacggtgcgtacaagagcctctatgccacccacttggcacaccatcatcttgtttttgtaattattgcaagtgaggttagagagaattccagctgcacaggtgaccacatttatatcatcggaacccagaagctgcactagagtcccaaggaggccttccatcccttcctgcttagtcgctgcatctgaaaggtttctgagagtccaaagacagttttgaacaagtcgctgacttgggtctgtcagatgaagccccagtgcctgcatcccaccagcttctacaatggccggcttgttgctagagcagacagacagcaccttcagcactctgcttgtggtccacagaagcttctcataagtgtaggtcctcattatgtttactaaggcttggggtccaccactggccagaatgatgagcttgctctcttgattgccataagctaagatctgaaggcagtctgttgtaatagccaagaatttcacgtttgttttgttgagcaaagcaaccattttctgcagtccaccagctaggcgcactgccattttagctccttcctgatggagcaggagattatgcagtgtcgtgatggcgtagaacagtacagaatccactggtgacccaagcattttcaccagcgctgggatgccaccagacttaaagatggccagcaagccctcgcggtggtgagaaaggttgtgcagagtcccagcagtacaacgagctgtctctacatcatttgtattctgcatggtgcgtacaatggcagacaccatctgaggggagcgcatgatggcatgtctggaagcttcctttttggaaagctgatggaccataacagcagctttattaactaccacctggtcctcatcgtttagcagttttgtcagctcaggaattgcacgtgtggcaagttccgcgtcatcctgatagttaatcaaattgacaactgcatgtttcaacatctgtgatggttcagccaagcgctggacattagtgggatgagcagcgtcaaactgcgtggatgggatctgcatgccctcatctagcgtctcagggaacatggcagctcggaccctctgagccctagtcattgcatactgcccgtcaatatcagctacttgctcttgcgtgaaggactgggaaaagccttgctcccattcataaaggacttgggaggtgtcaacatcttcttcctcagggttgcccttgccactcagggaaggagctgtggtggtggcaccagaatggattccagaatccaagtaagactgctgctgccagtggctgacagcagcttttctgtccggctccatggccatgtccaactccatcaggtcagcttgagtagccattgtccacgcagcggtgtcacagcagctgtgcgctgagcttcaggtaccctcaggcccgcgcgctgctcactcgcggccgcccgctcggcctcggcctcctgcactgacggctcggcgcccaccgtgctccgtctccgcctccccgggccgcgggcttcacaggacacgagctgacgcggccgccaccgagcgagggcttaagatggcgccgcacaaggagcgatttataagcggcgcggcaccgtgtatcctgccgctgccgctccgcgcggagcgttccgccgcgc

SEQ ID NO: 5 - DNA, 2352 bp, Rattus norvegicus
  source 1..2352: mol_type = genomic DNA
tggacaatggctactcaagctgacctcatggagttggacatggccatggagccagacagaaaggccgctgtcagccactggcagcagcaatcttacctggattctggaatccactctggtgccaccaccacagctccttccctgagtggcaagggcaatcctgaggaagaagatgtggacacctcccaagtcctttatgagtgggagcaaggcttttcccagtccttcacgcaagagcaagtagctgacattgacggtcagtacgccatgactcgggctcagagggtccgagctgccatgttccctgagacactagatgagggcatgcagatcccatccacgcagtttgatgccgctcatcccactaatgtccagcgcttggctgaaccgtcacagatgctgaaacatgcagttgtcaatttgattaactatcaggatgacgcggaacttgccacccgtgcaattcctgagctgaccaaactgctaaatgacgaggaccaggtggtcgttaataaagctgctgttatggttcaccagctttccaaaaaggaagcttccagacacgccatcatgcgctcccctcagatggtgtctgccatagtgcgcaccatgcagaatacaaatgacgtagaaacagcccgttgtaccgctgggaccctacacaacctttcccaccatcgagagggcttgttggccatctttaaatctggcggcatcccagcgctggtgaaaatgcttgggtcgccagtggattccgtactgttctacgccatcaccacgctgcataatctcctgctacatcaggaaggagctaaaatggcagtgcgcctagctggtgggctgcagaaaatggttgctttgctcaacaaaacaaacgtgaagttcttggctattacgacagactgccttcagatcttagcttacggcaatcaggaaagcaagctcatcattctggccagtggtggaccccaagccttagtaaacataatgagaacctacacgtacgagaagctcctgtggaccacaagcagagtgctgaaggtgctgtctgtctgctctagcaacaagccggccatcgtggaagctggtgggatgcaggcactggggcctcacctgacagacccgagtcagcgacttgttcaaaactgtctttggactctgagaaacttgtccgatgcagcgactaagcaggaagggatggaaggcctccttgggactctagtgcagcttctgggttctgatgatataaatgtggtcacctgcgcagctggaattctctctaacctcacttgcaataattacaaaaacaagatgatggtgtgccaagtgggtggcatagaggctcttgtgcgcactgtccttcgtgctggtgacagggaggacattaccgagcctgccatctgtgctcttcgtcatctgaccagccgacatcaggaagctgagatggcccagaatgccgttcgccttcattatggactacctgttgtggttaaactcctgcacccaccatcccactggcctctgataaaggcaactgttggattgatccgaaaccttgccctttgcccagcaaatcatgcgcctttgcgggaacagggtgcgatcccacgactagttcagctgcttgtacgagcacatcaggacacccagcggcgcacgtccatgggtggaacacagcagcagttcgtggagggcgtccgcatggaggagatagttgaagggtgcactggggctctccacatcctcgctcgggatgttcacaaccggattgtgatccgaggactcaataccattccactgtttgtgcagttgctttattctcccattgaaaatatccaaagagtagctgcaggggtcctctgtgaacttgctcaggacaaggaggctgcagaggccattgaggctgagggagccacagctcccctgacagagttgctccactccaggaatgaaggcgtggcaacatatgcggctgctgttctattccgaatgtctgaggacaagccacaggactacaagaaacggctttcggttgagctgaccagttccctcttcaggacagagccaatggcttggaatgagactgctgatctcggactggacattggtgcccagggagaagcccttggatatcgccaggacgatcccagctaccgttcttttcactctggtggatacggccaggacgccttggggatggaccctatgatggagcatgagatgggtggccaccaccctggtgctgactatccagttgatgggctgcctgacctgggacacgcccaggacctcatggacgggctgcctccaggtgatagcaatcagctggcctggtttgataccgacctgtaa

SEQ ID NO: 6 - DNA, 2352 bp, Rattus norvegicus
  source 1..2352: mol_type = genomic DNA
ttacaggtcggtatcaaaccaggccagctgattgctatcacctggaggcagcccgtccatgaggtcctgggcgtgtcccaggtcaggcagcccatcaactggatagtcagcaccagggtggtggccacccatctcatgctccatcatagggtccatccccaaggcgtcctggccgtatccaccagagtgaaaagaacggtagctgggatcgtcctggcgatatccaagggcttctccctgggcaccaatgtccagtccgagatcagcagtctcattccaagccattggctctgtcctgaagagggaactggtcagctcaaccgaaagccgtttcttgtagtcctgtggcttgtcctcagacattcggaatagaacagcagccgcatatgttgccacgccttcattcctggagtggagcaactctgtcaggggagctgtggctccctcagcctcaatggcctctgcagcctccttgtcctgagcaagttcacagaggacccctgcagctactctttggatattttcaatgggagaataaagcaactgcacaaacagtggaatggtattgagtcctcggatcacaatccggttgtgaacatcccgagcgaggatgtggagagccccagtgcacccttcaactatctcctccatgcggacgccctccacgaactgctgctgtgttccacccatggacgtgcgccgctgggtgtcctgatgtgctcgtacaagcagctgaactagtcgtgggatcgcaccctgttcccgcaaaggcgcatgatttgctgggcaaagggcaaggtttcggatcaatccaacagttgcctttatcagaggccagtgggatggtgggtgcaggagtttaaccacaacaggtagtccataatgaaggcgaacggcattctgggccatctcagcttcctgatgtcggctggtcagatgacgaagagcacagatggcaggctcggtaatgtcctccctgtcaccagcacgaaggacagtgcgcacaagagcctctatgccacccacttggcacaccatcatcttgtttttgtaattattgcaagtgaggttagagagaattccagctgcgcaggtgaccacatttatatcatcagaacccagaagctgcactagagtcccaaggaggccttccatcccttcctgcttagtcgctgcatcggacaagtttctcagagtccaaagacagttttgaacaagtcgctgactcgggtctgtcaggtgaggccccagtgcctgcatcccaccagcttccacgatggccggcttgttgctagagcagacagacagcaccttcagcactctgcttgtggtccacaggagcttctcgtacgtgtaggttctcattatgtttactaaggcttggggtccaccactggccagaatgatgagcttgctttcctgattgccgtaagctaagatctgaaggcagtctgtcgtaatagccaagaacttcacgtttgttttgttgagcaaagcaaccattttctgcagcccaccagctaggcgcactgccattttagctccttcctgatgtagcaggagattatgcagcgtggtgatggcgtagaacagtacggaatccactggcgacccaagcattttcaccagcgctgggatgccgccagatttaaagatggccaacaagccctctcgatggtgggaaaggttgtgtagggtcccagcggtacaacgggctgtttctacgtcatttgtattctgcatggtgcgcactatggcagacaccatctgaggggagcgcatgatggcgtgtctggaagcttcctttttggaaagctggtgaaccataacagcagctttattaacgaccacctggtcctcgtcatttagcagtttggtcagctcaggaattgcacgggtggcaagttccgcgtcatcctgatagttaatcaaattgacaactgcatgtttcagcatctgtgacggttcagccaagcgctggacattagtgggatgagcggcatcaaactgcgtggatgggatctgcatgccctcatctagtgtctcagggaacatggcagctcggaccctctgagcccgagtcatggcgtactgaccgtcaatgtcagctacttgctcttgcgtgaaggactgggaaaagccttgctcccactcataaaggacttgggaggtgtccacatcttcttcctcaggattgcccttgccactcagggaaggagctgtggtggtggcaccagagtggattccagaatccaggtaagattgctgctgccagtggctgacagcggcctttctgtctggctccatggccatgtccaactccatgaggtcagcttgagtagccattgtcca

SEQ ID NO: 7 - DNA, 3034 bp, Macaca fascicularis
  source 1..3034: mol_type = genomic DNA
gttacctgtatgaattaagataaggagttatgccagaatggtatttgaagtataccatacaactgttttgaaaatccagcgtggacaatggctactcaaggctaccttttgctccattttctgctcactcctcctaatggcttggtgaaatagcaaacaagccaccagcaggaatctagtctggatgactgcttctggagcctggatgcagtaccattcttccactgattcactgatttgatggagttggacatggccatggaaccagacagaaaagcggctgttagtcactggcagcaacagtcttacctggactctggaatccattctggtgccactaccacagctccttctctgagtggtaaaggcaatcctgaggaagaggatgtggatacctcccaagtcctgtatgagtgggaacagggattttctcagtccttcactcaagaacaagtagctgatattgatggacagtatgcaatgactcgagctcagagggtacgagctgctatgttccctgagacattagatgagggcatgcagatcccatctacacagtttgatgctgctcatcccactaatgtccagcgtttggctgaaccatcacagatgctgaaacatgcagttgtaaacttgattaactatcaagatgatgcagaacttgccacacgtgcaatccctgaactgacaaaactgctaaatgatgaggaccaggtggtggttaataaggctgcagttatggtccatcagctttctaaaaaggaagcttccagacacgctatcatgcgttctcctcagatggtgtctgctattgtacgtaccatgcagaatacaaatgatgtagaaacagctcgttgtaccgctgggaccttgcataacctttcccatcatcgggagggcttgttggccatctttaagtctggaggcattcctgccctggtgaaaatgcttggttcaccagtggattctgtgttgttttatgccattacaactctccacaaccttttattacatcaagaaggagctaaaatggcagtgcgtttagctggcgggctacagaaaatggttgccttgctcaacaaaacaaacgttaaattcttggctattacgacagactgccttcaaattttagcatatggcaaccaagaaagcaagctgatcatactggctagtggtggaccccaagctttagtaaatataatgaggacctatacttatgagaaactactgtggaccacaagcagagtgctgaaggtgctatccgtctgctctagtaataagccagctattgtagaagctggtggaatgcaagctttaggacttcacctgacagatccaagtcaacgtcttgttcagaactgtctttggactctcaggaatctttcagatgctgcaactaaacaggaagggatggaaggtctccttgggactcttgttcagcttctgggttcagatgatataaatgtggtcacctgtgcagctggaattctttctaacctcacttgcaataattataagaataagatgatggtctgccaagtgggtggtatagaggctcttgtgcgtactgtccttcgggctggtgacagggaagacgtcactgagcctgccatctgtgctcttcgtcatctgaccagccgacaccaagaagcagagatggcccagaatgcagttcgccttcactatggactaccagttgtggttaagctcttacacccaccatcccactggcctctgataaaggctactgttggattgattcgaaatcttgccctttgtccagcaaatcatgcacctttgcgtgagcagggtgccattccacgactagttcagttgcttgttcgtgcacatcaggatacccagcgccgtacgtccatgggtgggacacagcagcaatttgtggagggggtccgcatggaagaaatagttgaaggttgtactggagcccttcacatcctagctcgggatgttcacaaccgaattgtaatcagaggactaaataccattccattgtttgtgcagctgctttattctcccattgaaaacatccaaagagtagctgcaggggtcctctgtgaacttgctcaggacaaggaagctgcagaagcgattgaagctgagggagccacagctcctctgacagagttacttcactctaggaatgaaggtgtggcgacgtatgcagctgctgttttgttccgaatgtctgaggacaagccacaagattacaagaaacggctttcagttgagctgaccagctctctcttcagaacggagccaatggcttggaatgagactgcggatcttggacttgatattggtgcccagggagaaccccttggatatcgccaggatgatcctagctatcgttcttttcactctggtggatatggccaggatgccttgggtatggaccccatgatggaacatgagatgggtggccaccaccctggtgctgactatccagttgatgggctgccagatctgggacatgcccaggacctcatggatgggctgcctccaggtgatagcaatcagctggcctggtttgatactgacctgtaaatcatcctttaggtaagaagttttaaaaagccagtttgggtaaaatacttttactctgcctacagaatttcagaaagacttggttggtagggtgggagtgatttaggctatttgtaaatctgccacaaaaacaggtatatactttgaaaggagatgtcttggaacatcggaatgttctcagatttctggttgttatgtgatcatgtgtggaagttattaactttaatgttttttgccgcagcttttgcaacttaatactcaaatgagtaacatttgctgttttaaacattaatagcagcctttctctctttatacagctgtattgtctgaacttgcattgtgattggcctgtagagttgctgagagggctcgaggggtgggctggtatctcagaaagtgcctgacacactaaccaagctgagtttcctatgggaacaattgaagtaaacttaaaaaaaaaaaaaaaaaa

SEQ ID NO: 8 - DNA, 3034 bp, Macaca fascicularis
  source 1..3034: mol_type = genomic DNA
ttttttttttttttttttaagtttacttcaattgttcccataggaaactcagcttggttagtgtgtcaggcactttctgagataccagcccacccctcgagccctctcagcaactctacaggccaatcacaatgcaagttcagacaatacagctgtataaagagagaaaggctgctattaatgtttaaaacagcaaatgttactcatttgagtattaagttgcaaaagctgcggcaaaaaacattaaagttaataacttccacacatgatcacataacaaccagaaatctgagaacattccgatgttccaagacatctcctttcaaagtatatacctgtttttgtggcagatttacaaatagcctaaatcactcccaccctaccaaccaagtctttctgaaattctgtaggcagagtaaaagtattttacccaaactggctttttaaaacttcttacctaaaggatgatttacaggtcagtatcaaaccaggccagctgattgctatcacctggaggcagcccatccatgaggtcctgggcatgtcccagatctggcagcccatcaactggatagtcagcaccagggtggtggccacccatctcatgttccatcatggggtccatacccaaggcatcctggccatatccaccagagtgaaaagaacgatagctaggatcatcctggcgatatccaaggggttctccctgggcaccaatatcaagtccaagatccgcagtctcattccaagccattggctccgttctgaagagagagctggtcagctcaactgaaagccgtttcttgtaatcttgtggcttgtcctcagacattcggaacaaaacagcagctgcatacgtcgccacaccttcattcctagagtgaagtaactctgtcagaggagctgtggctccctcagcttcaatcgcttctgcagcttccttgtcctgagcaagttcacagaggacccctgcagctactctttggatgttttcaatgggagaataaagcagctgcacaaacaatggaatggtatttagtcctctgattacaattcggttgtgaacatcccgagctaggatgtgaagggctccagtacaaccttcaactatttcttccatgcggaccccctccacaaattgctgctgtgtcccacccatggacgtacggcgctgggtatcctgatgtgcacgaacaagcaactgaactagtcgtggaatggcaccctgctcacgcaaaggtgcatgatttgctggacaaagggcaagatttcgaatcaatccaacagtagcctttatcagaggccagtgggatggtgggtgtaagagcttaaccacaactggtagtccatagtgaaggcgaactgcattctgggccatctctgcttcttggtgtcggctggtcagatgacgaagagcacagatggcaggctcagtgacgtcttccctgtcaccagcccgaaggacagtacgcacaagagcctctataccacccacttggcagaccatcatcttattcttataattattgcaagtgaggttagaaagaattccagctgcacaggtgaccacatttatatcatctgaacccagaagctgaacaagagtcccaaggagaccttccatcccttcctgtttagttgcagcatctgaaagattcctgagagtccaaagacagttctgaacaagacgttgacttggatctgtcaggtgaagtcctaaagcttgcattccaccagcttctacaatagctggcttattactagagcagacggatagcaccttcagcactctgcttgtggtccacagtagtttctcataagtataggtcctcattatatttactaaagcttggggtccaccactagccagtatgatcagcttgctttcttggttgccatatgctaaaatttgaaggcagtctgtcgtaatagccaagaatttaacgtttgttttgttgagcaaggcaaccattttctgtagcccgccagctaaacgcactgccattttagctccttcttgatgtaataaaaggttgtggagagttgtaatggcataaaacaacacagaatccactggtgaaccaagcattttcaccagggcaggaatgcctccagacttaaagatggccaacaagccctcccgatgatgggaaaggttatgcaaggtcccagcggtacaacgagctgtttctacatcatttgtattctgcatggtacgtacaatagcagacaccatctgaggagaacgcatgatagcgtgtctggaagcttcctttttagaaagctgatggaccataactgcagccttattaaccaccacctggtcctcatcatttagcagttttgtcagttcagggattgcacgtgtggcaagttctgcatcatcttgatagttaatcaagtttacaactgcatgtttcagcatctgtgatggttcagccaaacgctggacattagtgggatgagcagcatcaaactgtgtagatgggatctgcatgccctcatctaatgtctcagggaacatagcagctcgtaccctctgagctcgagtcattgcatactgtccatcaatatcagctacttgttcttgagtgaaggactgagaaaatccctgttcccactcatacaggacttgggaggtatccacatcctcttcctcaggattgcctttaccactcagagaaggagctgtggtagtggcaccagaatggattccagagtccaggtaagactgttgctgccagtgactaacagccgcttttctgtctggttccatggccatgtccaactccatcaaatcagtgaatcagtggaagaatggtactgcatccaggctccagaagcagtcatccagactagattcctgctggtggcttgtttgctatttcaccaagccattaggaggagtgagcagaaaatggagcaaaaggtagccttgagtagccattgtccacgctggattttcaaaacagttgtatggtatacttcaaataccattctggcataactccttatcttaattcatacaggtaac

SEQ ID NO: 9 - DNA, 3405 bp, Macaca mulatta
  source 1..3405: mol_type = genomic DNA
ggcagcttttgggcgacttataagagctccttgtgcggcgccattttaagcctcttggtctgtggcagccgtgttggcccggccccgagagcggagagcgaggggaggcggagacggaggaaggtccgaggagcagcttcagtcctcgccgagccgccaccgcaggtcgaggacggtcggactcccgcgacgggaggagcctgttcccctgagggtatttgaagtataccatacaactgttttgaaaatccagcgtggacaatggctactcaagctgatttgatggagttggacatggccatggaaccagacagaaaagcggctgttagtcactggcagcaacagtcttacctggactctggaatccattctggtgccactaccacagctccttctctgagtggtaaaggcaatcctgaggaagaggatgtggatacctcccaagtcctgtatgagtgggaacagggattttctcagtccttcactcaagaacaagtagctgatattgatggacagtatgcaatgactcgagctcagagggtacgagctgctatgttccctgagacattagatgagggcatgcagatcccatctacacagtttgatgctgctcatcccactaatgtccagcgtttggctgaaccatcacagatgctgaaacatgcagttgtaaacttgattaactatcaagatgatgcagaacttgccacacgtgcaattcctgaactgacaaaactgctaaatgatgaggaccaggtggtggttaataaggctgcagttatggtccatcagctttctaaaaaggaagcttccagacacgctatcatgcgttctcctcagatggtgtctgctattgtacgtaccatgcagaatacaaatgatgtagaaacagctcgttgtaccgctgggaccttgcataacctttcccatcatcgggagggcttgttggccatctttaagtctggaggcattcctgccctggtgaaaatgcttggttcaccagtggattctgtgttgttttatgccattacaactctccacaaccttttattacatcaagaaggagctaaaatggcagtgcgtttagctggcgggctacagaaaatggttgccttgctcaacaaaacaaacgttaaattcttggctattacgacagactgccttcaaattttagcatatggcaaccaagaaagcaagctgatcatactggctagtggtggaccccaagctttagtaaatataatgaggacctatacttatgagaaactactgtggaccacaagcagagtgctgaaggtgctatccgtctgctctagtaataagccagctattgtagaagctggtggaatgcaagctttaggacttcacctgacagatccaagtcaacgtcttgttcagaactgtctttggactctcaggaatctttcagatgctgcaactaaacaggaagggatggaaggtctccttgggactcttgttcagcttctgggttcagatgatataaatgtggtcacctgtgcagctggaattctttctaacctcacttgcaataattataagaataagatgatggtctgccaagtgggtggtatagaggctcttgtgcgtactgtccttcgggctggtgacagggaagacatcactgagcctgccatctgtgctcttcgtcatctgaccagccgacaccaagaagcagagatggcccagaatgcagttcgccttcactatggactaccagttgtggttaagctcttacacccaccatcccactggcctctgataaaggctactgttggattgattcgaaatcttgccctttgtccagcaaatcatgcacctttgcgtgagcagggtgccattccacgactagttcagttgcttgttcgtgcacatcaggatacccagcgccgtacgtccatgggtgggacacagcagcaatttgtggagggggtccgcatggaagaaatagttgaaggttgtactggagcccttcacatcctagctcgggatgttcacaaccgaattgtaatcagaggactaaataccattccattgtttgtgcagctgctttattctcccattgaaaacatccaaagagtagctgcaggggtcctctgtgaacttgctcaggacaaggaagctgcagaagcgattgaagctgagggagccacagctcctctgacagagttacttcactctaggaatgaaggtgtggcgacgtatgcagctgctgttttgttccgaatgtctgaggacaagccacaagattacaagaaacggctttcagttgagctgaccagctctctcttcagaacggagccaatggcttggaatgagactgcggatcttggacttgatattggtgcccagggagaaccccttggatatcgccaggatgatcctagctatcgttcttttcactctggtggatatggccaggatgccttgggtatggaccccatgatggaacatgagatgggtggccaccaccctggtgctgactatccagttgatgggctgccagatctgggacatgcccaggacctcatggatgggctgcctccaggtgatagcaatcagctggcctggtttgatactgacctgtaaatcatcctttagctgtattgtctgaacttgcattgtgattggcctgtagagttgctgagagggctcgaggggtgggctggtatctcagaaagtgcctgacacactaaccaagctgagtttcctatgggaacaattgaagtaaactttttgttctggtcctttttggtcgaggagtaacaatacaaatggattttgggagtgactcaagaagtgaagaatgcacaagaatggatcacaagatggaatttatcaaaccctagccttgcttgttaaattttttttttttttaatatctgtaatggtactgactttgcttgctttgaagtagctctttaatttttttttttttttttttttttttgcagtaactgttagtttaagtctctcgtagtgttaagttatagtgaatactgctacagcaatttctaatttttaagaattgagtaatggtgtagaacactaattcataatcactctaataattgtaatctgaataaagtgtaacattgtgtagcctttttgtataaaatagacaaatagaaaatggtccaattagtttcctttttaatatgcttaaaataagcaggtggatctatttcatgtttttgatcaaaaactttatttgggatatgtatgggtagggtaaatcagtaagaggtgttatttggaaccttgttttggacagtttaccagttgccttttatcccaaagttgttgtaacctgctgtgatacaatgcttcaagagaaaatgcggttataaaaaatggttcagaattaaacttttaattcattcaaaa

SEQ ID NO: 10 - DNA, 3405 bp, Macaca mulatta
  source 1..3405: mol_type = genomic DNA
ttttgaatgaattaaaagtttaattctgaaccattttttataaccgcattttctcttgaagcattgtatcacagcaggttacaacaactttgggataaaaggcaactggtaaactgtccaaaacaaggttccaaataacacctcttactgatttaccctacccatacatatcccaaataaagtttttgatcaaaaacatgaaatagatccacctgcttattttaagcatattaaaaaggaaactaattggaccattttctatttgtctattttatacaaaaaggctacacaatgttacactttattcagattacaattattagagtgattatgaattagtgttctacaccattactcaattcttaaaaattagaaattgctgtagcagtattcactataacttaacactacgagagacttaaactaacagttactgcaaaaaaaaaaaaaaaaaaaaaaaaattaaagagctacttcaaagcaagcaaagtcagtaccattacagatattaaaaaaaaaaaaaatttaacaagcaaggctagggtttgataaattccatcttgtgatccattcttgtgcattcttcacttcttgagtcactcccaaaatccatttgtattgttactcctcgaccaaaaaggaccagaacaaaaagtttacttcaattgttcccataggaaactcagcttggttagtgtgtcaggcactttctgagataccagcccacccctcgagccctctcagcaactctacaggccaatcacaatgcaagttcagacaatacagctaaaggatgatttacaggtcagtatcaaaccaggccagctgattgctatcacctggaggcagcccatccatgaggtcctgggcatgtcccagatctggcagcccatcaactggatagtcagcaccagggtggtggccacccatctcatgttccatcatggggtccatacccaaggcatcctggccatatccaccagagtgaaaagaacgatagctaggatcatcctggcgatatccaaggggttctccctgggcaccaatatcaagtccaagatccgcagtctcattccaagccattggctccgttctgaagagagagctggtcagctcaactgaaagccgtttcttgtaatcttgtggcttgtcctcagacattcggaacaaaacagcagctgcatacgtcgccacaccttcattcctagagtgaagtaactctgtcagaggagctgtggctccctcagcttcaatcgcttctgcagcttccttgtcctgagcaagttcacagaggacccctgcagctactctttggatgttttcaatgggagaataaagcagctgcacaaacaatggaatggtatttagtcctctgattacaattcggttgtgaacatcccgagctaggatgtgaagggctccagtacaaccttcaactatttcttccatgcggaccccctccacaaattgctgctgtgtcccacccatggacgtacggcgctgggtatcctgatgtgcacgaacaagcaactgaactagtcgtggaatggcaccctgctcacgcaaaggtgcatgatttgctggacaaagggcaagatttcgaatcaatccaacagtagcctttatcagaggccagtgggatggtgggtgtaagagcttaaccacaactggtagtccatagtgaaggcgaactgcattctgggccatctctgcttcttggtgtcggctggtcagatgacgaagagcacagatggcaggctcagtgatgtcttccctgtcaccagcccgaaggacagtacgcacaagagcctctataccacccacttggcagaccatcatcttattcttataattattgcaagtgaggttagaaagaattccagctgcacaggtgaccacatttatatcatctgaacccagaagctgaacaagagtcccaaggagaccttccatcccttcctgtttagttgcagcatctgaaagattcctgagagtccaaagacagttctgaacaagacgttgacttggatctgtcaggtgaagtcctaaagcttgcattccaccagcttctacaatagctggcttattactagagcagacggatagcaccttcagcactctgcttgtggtccacagtagtttctcataagtataggtcctcattatatttactaaagcttggggtccaccactagccagtatgatcagcttgctttcttggttgccatatgctaaaatttgaaggcagtctgtcgtaatagccaagaatttaacgtttgttttgttgagcaaggcaaccattttctgtagcccgccagctaaacgcactgccattttagctccttcttgatgtaataaaaggttgtggagagttgtaatggcataaaacaacacagaatccactggtgaaccaagcattttcaccagggcaggaatgcctccagacttaaagatggccaacaagccctcccgatgatgggaaaggttatgcaaggtcccagcggtacaacgagctgtttctacatcatttgtattctgcatggtacgtacaatagcagacaccatctgaggagaacgcatgatagcgtgtctggaagcttcctttttagaaagctgatggaccataactgcagccttattaaccaccacctggtcctcatcatttagcagttttgtcagttcaggaattgcacgtgtggcaagttctgcatcatcttgatagttaatcaagtttacaactgcatgtttcagcatctgtgatggttcagccaaacgctggacattagtgggatgagcagcatcaaactgtgtagatgggatctgcatgccctcatctaatgtctcagggaacatagcagctcgtaccctctgagctcgagtcattgcatactgtccatcaatatcagctacttgttcttgagtgaaggactgagaaaatccctgttcccactcatacaggacttgggaggtatccacatcctcttcctcaggattgcctttaccactcagagaaggagctgtggtagtggcaccagaatggattccagagtccaggtaagactgttgctgccagtgactaacagccgcttttctgtctggttccatggccatgtccaactccatcaaatcagcttgagtagccattgtccacgctggattttcaaaacagttgtatggtatacttcaaataccctcaggggaacaggctcctcccgtcgcgggagtccgaccgtcctcgacctgcggtggcggctcggcgaggactgaagctgctcctcggaccttcctccgtctccgcctcccctcgctctccgctctcggggccgggccaacacggctgccacagaccaagaggcttaaaatggcgccgcacaaggagctcttataagtcgcccaaaagctgcc

SEQ ID NO: 11-13 - skipped (3 entries)

SEQ ID NO: 14 - protein, 16 aa, unidentified
AAVALLPAVLLALLAP

SEQ ID NO: 15 - protein, 11 aa, unidentified
AALLPVLLAAP

SEQ ID NO: 16 - protein, 13 aa, Human immunodeficiency virus 1
GRKKRRQRRRPPQ

SEQ ID NO: 17 - protein, 16 aa, Drosophila sp.
RQIKIWFQNRRMKWKK

SEQ ID NO: 18 - RNA, 23 nt, synthetic construct
  source 1..23: mol_type = other RNA
  modified_base 2: mod_base = OTHER; note = thymine
  modified_base 12: mod_base = OTHER; note = thymine
tttcgaatcaatccaacagtagc

SEQ ID NO: 19 - RNA, 21 nt, synthetic construct
  source 1..21: mol_type = other RNA
tactgttggattgattcgaaa

SEQ ID NO: 20 - RNA, 21 nt, synthetic construct
  source 1..21: mol_type = other RNA
  modified_base 1: mod_base = OTHER; note = 2'-O-methyluridine-3'-phosphorothioate
  modified_base 2: mod_base = OTHER; note = 2'-O-methyladenosine-3'-phosphorothioate
  modified_base 3: mod_base = OTHER; note = 2'-O-methylcytidine-3'-phosphate
  modified_base 4: mod_base = OTHER; note = 2'-O-methyluridine-3'-phosphate
  modified_base 5: mod_base = OTHER; note = 2'-O-methylguanosine-3'-phosphate
  modified_base 6: mod_base = OTHER; note = 2'-O-methyluridine-3'-phosphate
  modified_base 7: mod_base = OTHER; note = 2'-O-methyluridine-3'-phosphate
  modified_base 8: mod_base = OTHER; note = 2'-O-methylguanosine-3'-phosphate
  modified_base 9: mod_base = OTHER; note = 2'-fluoroguanosine-3'-phosphate
  modified_base 10: mod_base = OTHER; note = 2'-fluoroadenosine-3'-phosphate
  modified_base 11: mod_base = OTHER; note = 2'-fluorouridine-3'-phosphate
  modified_base 12: mod_base = OTHER; note = 2'-O-methyluridine-3'-phosphate
  modified_base 13: mod_base = OTHER; note = 2'-O-methylguanosine-3'-phosphate
  modified_base 14: mod_base = OTHER; note = 2'-O-methyladenosine-3'-phosphate
  modified_base 15: mod_base = OTHER; note = 2'-O-methyluridine-3'-phosphate
  modified_base 16: mod_base = OTHER; note = 2'-O-methyluridine-3'-phosphate
  modified_base 17: mod_base = OTHER; note = 2'-O-methylcytidine-3'-phosphate
  modified_base 18: mod_base = OTHER; note = 2'-O-methylguanosine-3'-phosphate
  modified_base 19: mod_base = OTHER; note = 2'-O-methyladenosine-3'-phosphorothioate
  modified_base 20: mod_base = OTHER; note = 2'-O-methyladenosine-3'-phosphorothioate
  modified_base 21: mod_base = OTHER; note = 2'-O-methyladenosine-3'-phosphate
tactgttggattgattcgaaa

SEQ ID NO: 21 - DNA, 23 bp, synthetic construct
  source 1..23: mol_type = other DNA
  modified_base 1: mod_base = OTHER; note = Vinyl-phosphonate-2'-O-methyluridine-3'-phosphate
  modified_base 3: mod_base = OTHER; note = 2'-O-methyluridine-3'-phosphate
  modified_base 4: mod_base = OTHER; note = 2'-O-methylcytidine-3'-phosphate
  modified_base 6: mod_base = OTHER; note = 2'-O-methyladenosine-3'-phosphate
  modified_base 8: mod_base = OTHER; note = 2'-O-methyluridine-3'-phosphate
  modified_base 9: mod_base = OTHER; note = 2'-O-methylcytidine-3'-phosphate
  modified_base 10: mod_base = OTHER; note = 2'-O-methyladenosine-3'-phosphate
  modified_base 11: mod_base = OTHER; note = 2'-O-methyladenosine-3'-phosphate
  modified_base 13: mod_base = OTHER; note = 2'-O-methylcytidine-3'-phosphate
  modified_base 14: mod_base = OTHER; note = 2'-fluorocytidine-3'-phosphate
  modified_base 15: mod_base = OTHER; note = 2'-O-methyladenosine-3'-phosphate
  modified_base 16: mod_base = OTHER; note = 2'-O-methyladenosine-3'-phosphate
  modified_base 17: mod_base = OTHER; note = 2'-O-methylcytidine-3'-phosphate
  modified_base 18: mod_base = OTHER; note = 2'-O-methyladenosine-3'-phosphate
  modified_base 19: mod_base = OTHER; note = 2'-O-methylguanosine-3'-phosphate
  modified_base 20: mod_base = OTHER; note = 2'-O-methyluridine-3'-phosphate
  modified_base 21: mod_base = OTHER; note = 2'-O-methyladenosine-3'-phosphorothioate
  modified_base 22: mod_base = OTHER; note = 2'-O-methylguanosine-3'-phosphorothioate
  modified_base 23: mod_base = OTHER; note = 2'-O-methylcytidine-3'-phosphate
  misc_feature 1: note = RNA
  misc_feature 2: note = DNA
  misc_feature 3..4: note = RNA
  misc_feature 5: note = DNA
  misc_feature 6: note = RNA
  misc_feature 7: note = DNA
  misc_feature 8..11: note = RNA
  misc_feature 12: note = DNA
  misc_feature 13..23: note = RNA
tttcgaatcaatccaacagtagc

SEQ ID NO: 22 - DNA, 21 bp, synthetic construct
  source 1..21: mol_type = other DNA
  modified_base 1: mod_base = OTHER; note = 2'-O-methylcytidine-3'-phosphate
  modified_base 2: mod_base = OTHER; note = 2'-O-methyluridine-3'-phosphate
  modified_base 3: mod_base = OTHER; note = 2'-O-methyluridine-3'-phosphate
  modified_base 5: mod_base = OTHER; note = 2'-O-methylcytidine-3'-phosphate
  modified_base 7: mod_base = OTHER; note = 2'-O-methylcytidine-3'-phosphate
  modified_base 8: mod_base = OTHER; note = 2'-O-methyluridine-3'-phosphate
  modified_base 12: mod_base = OTHER; note = 2'-O-methyluridine-3'-phosphate
  modified_base 14: mod_base = OTHER; note = 2'-O-methylcytidine-3'-phosphate
  modified_base 15: mod_base = OTHER; note = 2'-O-methyluridine-3'-phosphate
  modified_base 16: mod_base = OTHER; note = 2'-O-methyluridine-3'-phosphate
  modified_base 17: mod_base = OTHER; note = 2'-O-methylcytidine-3'-phosphate
  modified_base 20: mod_base = OTHER; note = 2'-deoxythimidine-3'-phosphorothioate
  misc_feature 1..19: note = RNA
  misc_feature 20..21: note = DNA
cttacgctgagtacttcgatt

SEQ ID NO: 23 - DNA, 21 bp, synthetic construct
  source 1..21: mol_type = other DNA
  modified_base 7: mod_base = OTHER; note = 2'-O-methyluridine-3'-phosphate
  modified_base 11: mod_base = OTHER; note = 2'-O-methylcytidine-3'-phosphate
  modified_base 16: mod_base = OTHER; note = 2'-O-methyluridine-3'-phosphate
  modified_base 20: mod_base = OTHER; note = 2'-deoxythimidine-3'-phosphorothioate
  misc_feature 1..19: note = RNA
  misc_feature 20..21: note = DNA
tcgaagtactcagcgtaagtt

SEQ ID NO: 24 - RNA, 21 nt, synthetic construct
  source 1..21: mol_type = other RNA
gagggtatttgaagtatacca

SEQ ID NO: 25 - RNA, 21 nt, synthetic construct
  source 1..21: mol_type = other RNA
gggtatttgaagtataccata

SEQ ID NO: 26 - RNA, 21 nt, synthetic construct
  source 1..21: mol_type = other RNA
ggtatttgaagtataccataa

SEQ ID NO: 27 - RNA, 21 nt, synthetic construct
  source 1..21: mol_type = other RNA
tttgaagtataccatacaaca

SEQ ID NO: 28 - RNA, 21 nt, synthetic construct
  source 1..21: mol_type = other RNA
ttgaagtataccatacaacta

SEQ ID NO: 29 - RNA, 21 nt, synthetic construct
  source 1..21: mol_type = other RNA
tggacaatggctactcaagca

SEQ ID NO: 30 - RNA, 21 nt, synthetic construct
  source 1..21: mol_type = other RNA
gacaatggctactcaagctga

SEQ ID NO: 31 - RNA, 21 nt, synthetic construct
  source 1..21: mol_type = other RNA
acaatggctactcaagctgaa

SEQ ID NO: 32 - RNA, 21 nt, synthetic construct
  source 1..21: mol_type = other RNA
aagctgatttgatggagttga

SEQ ID NO: 33 - RNA, 21 nt, synthetic construct
  source 1..21: mol_type = other RNA
agctgatttgatggagttgga

SEQ ID NO: 34 - RNA, 21 nt, synthetic construct
  source 1..21: mol_type = other RNA
ccttctctgagtggtaaagga

SEQ ID NO: 35 - RNA, 21 nt, synthetic construct
  source 1..21: mol_type = other RNA
cagtccttcactcaagaacaa

SEQ ID NO: 36 - RNA, 21 nt, synthetic construct
  source 1..21: mol_type = other RNA
cttcactcaagaacaagtaga

SEQ ID NO: 37 - RNA, 21 nt, synthetic construct
  source 1..21: mol_type = other RNA
cactcaagaacaagtagctga

SEQ ID NO: 38 - RNA, 21 nt, synthetic construct
  source 1..21: mol_type = other RNA
gtagctgatattgatggacaa

SEQ ID NO: 39 - RNA, 21 nt, synthetic construct
  source 1..21: mol_type = other RNA
attgatggacagtatgcaata

SEQ ID NO: 40 - RNA, 21 nt, synthetic construct
  source 1..21: mol_type = other RNA
agtatgcaatgactcgagcta

SEQ ID NO: 41 - RNA, 21 nt, synthetic construct
  source 1..21: mol_type = other RNA
ggtacgagctgctatgttcca

SEQ ID NO: 42 - RNA, 21 nt, synthetic construct
  source 1..21: mol_type = other RNA
acgagctgctatgttccctga

SEQ ID NO: 43 - RNA, 21 nt, synthetic construct
  source 1..21: mol_type = other RNA
tgttccctgagacattagata

SEQ ID NO: 44 - RNA, 21 nt, synthetic construct
  source 1..21: mol_type = other RNA
ttccctgagacattagatgaa

SEQ ID NO: 45 - RNA, 21 nt, synthetic construct
  source 1..21: mol_type = other RNA
agatgagggcatgcagatcca

SEQ ID NO: 46 - RNA, 21 nt, synthetic construct
  source 1..21: mol_type = other RNA
ctgctcatcccactaatgtca

SEQ ID NO: 47 - RNA, 21 nt, synthetic construct
  source 1..21: mol_type = other RNA
accatcacagatgctgaaaca

SEQ ID NO: 48 - RNA, 21 nt, synthetic construct
  source 1..21: mol_type = other RNA
catcacagatgctgaaacata

SEQ ID NO: 49 - RNA, 21 nt, synthetic construct
  source 1..21: mol_type = other RNA
atgctgaaacatgcagttgta

SEQ ID NO: 50 - RNA, 21 nt, synthetic construct
  source 1..21: mol_type = other RNA
acatgcagttgtaaacttgaa

SEQ ID NO: 51 - RNA, 21 nt, synthetic construct
  source 1..21: mol_type = other RNA
atgcagttgtaaacttgatta

SEQ ID NO: 52 - RNA, 21 nt, synthetic construct
  source 1..21: mol_type = other RNA
acgtgcaatccctgaactgaa

SEQ ID NO: 53 - RNA, 21 nt, synthetic construct
  source 1..21: mol_type = other RNA
tgcaatccctgaactgacaaa

SEQ ID NO: 54 - RNA, 21 nt, synthetic construct
  source 1..21: mol_type = other RNA
gaccaggtggtggttaataaa

SEQ ID NO: 55 - RNA, 21 nt, synthetic construct
  source 1..21: mol_type = other RNA
ccaggtggtggttaataagga

SEQ ID NO: 56 - RNA, 21 nt, synthetic construct
  source 1..21: mol_type = other RNA
gttaataaggctgcagttata

SEQ ID NO: 57 - RNA, 21 nt, synthetic construct
  source 1..21: mol_type = other RNA
cctcagatggtgtctgctata

SEQ ID NO: 58 - RNA, 21 nt, synthetic construct
  source 1..21: mol_type = other RNA
tcagatggtgtctgctattga

SEQ ID NO: 59 - RNA, 21 nt, synthetic construct
  source 1..21: mol_type = other RNA
agatggtgtctgctattgtaa

SEQ ID NO: 60 - RNA, 21 nt, synthetic construct
  source 1..21: mol_type = other RNA
acgtaccatgcagaatacaaa

SEQ ID NO: 61 - RNA, 21 nt, synthetic construct
  source 1..21: mol_type = other RNA
cgtaccatgcagaatacaaaa

SEQ ID NO: 62 - RNA, 21 nt, synthetic construct
  source 1..21: mol_type = other RNA
gtaccatgcagaatacaaata

SEQ ID NO: 63 - RNA, 21 nt, synthetic construct
  source 1..21: mol_type = other RNA
taccatgcagaatacaaatga

SEQ ID NO: 64 - RNA, 21 nt, synthetic construct
  source 1..21: mol_type = other RNA
accatgcagaatacaaatgaa

SEQ ID NO: 65 - RNA, 21 nt, synthetic construct
  source 1..21: mol_type = other RNA
ccatgcagaatacaaatgata

SEQ ID NO: 66 - RNA, 21 nt, synthetic construct
  source 1..21: mol_type = other RNA
catgcagaatacaaatgatga

SEQ ID NO: 67 - RNA, 21 nt, synthetic construct
  source 1..21: mol_type = other RNA
atgcagaatacaaatgatgta

SEQ ID NO: 68 - RNA, 21 nt, synthetic construct
  source 1..21: mol_type = other RNA
gcagaatacaaatgatgtaga

SEQ ID NO: 69 - RNA, 21 nt, synthetic construct
  source 1..21: mol_type = other RNA
cagaatacaaatgatgtagaa

SEQ ID NO: 70 - RNA, 21 nt, synthetic construct
  source 1..21: mol_type = other RNA
tgatgtagaaacagctcgtta

SEQ ID NO: 71 - RNA, 21 nt, synthetic construct
  source 1..21: mol_type = other RNA
gatgtagaaacagctcgttga

SEQ ID NO: 72 - RNA, 21 nt, synthetic construct
  source 1..21: mol_type = other RNA
actggccatctttaagtctga

SEQ ID NO: 73 - RNA, 21 nt, synthetic construct
  source 1..21: mol_type = other RNA
ctggccatctttaagtctgga

SEQ ID NO: 74 - RNA, 21 nt, synthetic construct
  source 1..21: mol_type = other RNA
tggccatctttaagtctggaa

SEQ ID NO: 75 - RNA, 21 nt, synthetic construct
  source 1..21: mol_type = other RNA
ggccatctttaagtctggaga

SEQ ID NO: 76 - RNA, 21 nt, synthetic construct
  source 1..21: mol_type = other RNA
gccatctttaagtctggagga

SEQ ID NO: 77 - RNA, 21 nt, synthetic construct
  source 1..21: mol_type = other RNA
tggttcaccagtggattctga

SEQ ID NO: 78 - RNA, 21 nt, synthetic construct
  source 1..21: mol_type = other RNA
accagtggattctgtgttgta

SEQ ID NO: 79 - RNA, 21 nt, synthetic construct
  source 1..21: mol_type = other RNA
atggcagtgcgtttagctgga

SEQ ID NO: 80 - RNA, 21 nt, synthetic construct
  source 1..21: mol_type = other RNA
ttgccttgctcaacaaaacaa

SEQ ID NO: 81 - RNA, 21 nt, synthetic construct
  source 1..21: mol_type = other RNA
tgccttgctcaacaaaacaaa

SEQ ID NO: 82 - RNA, 21 nt, synthetic construct
  source 1..21: mol_type = other RNA
gccttgctcaacaaaacaaaa

SEQ ID NO: 83 - RNA, 21 nt, synthetic construct
  source 1..21: mol_type = other RNA
ttaaattcttggctattacga

SEQ ID NO: 84 - RNA, 21 nt, synthetic construct
  source 1..21: mol_type = other RNA
attcttggctattacgacaga

SEQ ID NO: 85 - RNA, 21 nt, synthetic construct
  source 1..21: mol_type = other RNA
ggctattacgacagactgcca

SEQ ID NO: 86 - RNA, 21 nt, synthetic construct
  source 1..21: mol_type = other RNA
tacgacagactgccttcaaaa

SEQ ID NO: 87 - RNA, 21 nt, synthetic construct
  source 1..21: mol_type = other RNA
ctttagtaaatataatgagga

SEQ ID NO: 88 - RNA, 21 nt, synthetic construct
  source 1..21: mol_type = other RNA
tataatgaggacctatactta

SEQ ID NO: 89 - RNA, 21 nt, synthetic construct
  source 1..21: mol_type = other RNA
agctggtggaatgcaagctta

SEQ ID NO: 90 - RNA, 21 nt, synthetic construct
  source 1..21: mol_type = other RNA
cagatccaagtcaacgtctta

SEQ ID NO: 91 - RNA, 21 nt, synthetic construct
  source 1..21: mol_type = other RNA
ccaagtcaacgtcttgttcaa

SEQ ID NO: 92 - RNA, 21 nt, synthetic construct
  source 1..21: mol_type = other RNA
agaactgtctttggactctca

SEQ ID NO: 93 - RNA, 21 nt, synthetic construct
  source 1..21: mol_type = other RNA
ctttcagatgctgcaactaaa

SEQ ID NO: 94 - RNA, 21 nt, synthetic construct
  source 1..21: mol_type = other RNA
tcagatgctgcaactaaacaa

SEQ ID NO: 95 - RNA, 21 nt, synthetic construct
  source 1..21: mol_type = other RNA
gatgctgcaactaaacaggaa

SEQ ID NO: 96 - RNA, 21 nt, synthetic construct
  source 1..21: mol_type = other RNA
ctgcaactaaacaggaaggga

SEQ ID NO: 97 - RNA, 21 nt, synthetic construct
  source 1..21: mol_type = other RNA
gaagggatggaaggtctccta

SEQ ID NO: 98 - RNA, 21 nt, synthetic construct
  source 1..21: mol_type = other RNA
cttctgggttcagatgatata

SEQ ID NO: 99 - RNA, 21 nt, synthetic construct
  source 1..21: mol_type = other RNA
cctgtgcagctggaattctta

SEQ ID NO: 100 - RNA, 21 nt, synthetic construct
  source 1..21: mol_type = other RNA
tgtgcagctggaattctttca

SEQ ID NO: 101 - RNA, 21 nt, synthetic construct
  source 1..21: mol_type = other RNA
aattctttctaacctcactta

SEQ ID NO: 102 - RNA, 21 nt, synthetic construct
  source 1..21: mol_type = other RNA
ttctttctaacctcacttgca

SEQ ID NO: 103 - RNA, 21 nt, synthetic construct
  source 1..21: mol_type = other RNA
ctttctaacctcacttgcaaa

SEQ ID NO: 104 - RNA, 21 nt, synthetic construct
  source 1..21: mol_type = other RNA
tttctaacctcacttgcaata

SEQ ID NO: 105 - RNA, 21 nt, synthetic construct
  source 1..21: mol_type = other RNA
ctaacctcacttgcaataata

SEQ ID NO: 106 - RNA, 21 nt, synthetic construct
  source 1..21: mol_type = other RNA
taacctcacttgcaataatta

SEQ ID NO: 107 - RNA, 21 nt, synthetic construct
  source 1..21: mol_type = other RNA
aacctcacttgcaataattaa

SEQ ID NO: 108 - RNA, 21 nt, synthetic construct
  source 1..21: mol_type = other RNA
acctcacttgcaataattata

SEQ ID NO: 109 - RNA, 21 nt, synthetic construct
  source 1..21: mol_type = other RNA
cctcacttgcaataattataa

SEQ ID NO: 110 - RNA, 21 nt, synthetic construct
  source 1..21: mol_type = other RNA
ctcacttgcaataattataaa

SEQ ID NO: 111 - RNA, 21 nt, synthetic construct
  source 1..21: mol_type = other RNA
tcacttgcaataattataaga

SEQ ID NO: 112 - RNA, 21 nt, synthetic construct
  source 1..21: mol_type = other RNA
cacttgcaataattataagaa

SEQ ID NO: 113 - RNA, 21 nt, synthetic construct
  source 1..21: mol_type = other RNA
caagtgggtggtatagaggca

SEQ ID NO: 114 - RNA, 21 nt, synthetic construct
  source 1..21: mol_type = other RNA
gctcttgtgcgtactgtccta

SEQ ID NO: 115 - RNA, 21 nt, synthetic construct
  source 1..21: mol_type = other RNA
cctgccatctgtgctcttcga

SEQ ID NO: 116 - RNA, 21 nt, synthetic construct
  source 1..21: mol_type = other RNA
ctgccatctgtgctcttcgta

SEQ ID NO: 117 - RNA, 21 nt, synthetic construct
  source 1..21: mol_type = other RNA
tgccatctgtgctcttcgtca

SEQ ID NO: 118 - RNA, 21 nt, synthetic construct
  source 1..21: mol_type = other RNA
gccatctgtgctcttcgtcaa

SEQ ID NO: 119 - RNA, 21 nt, synthetic construct
  source 1..21: mol_type = other RNA
ccatctgtgctcttcgtcata

SEQ ID NO: 120 - RNA, 21 nt, synthetic construct
  source 1..21: mol_type = other RNA
atctgtgctcttcgtcatcta

SEQ ID NO: 121 - RNA, 21 nt, synthetic construct
  source 1..21: mol_type = other RNA
tctgtgctcttcgtcatctga

SEQ ID NO: 122 - RNA, 21 nt, synthetic construct
  source 1..21: mol_type = other RNA
ctgtgctcttcgtcatctgaa

SEQ ID NO: 123 - RNA, 21 nt, synthetic construct
  source 1..21: mol_type = other RNA
tgtgctcttcgtcatctgaca

SEQ ID NO: 124 - RNA, 21 nt, synthetic construct
  source 1..21: mol_type = other RNA
tggactaccagttgtggttaa

SEQ ID NO: 125 - RNA, 21 nt, synthetic construct
  source 1..21: mol_type = other RNA
gactaccagttgtggttaaga

SEQ ID NO: 126 - RNA, 21 nt, synthetic construct
  source 1..21: mol_type = other RNA
tgtggttaagctcttacacca

SEQ ID NO: 127 - RNA, 21 nt, synthetic construct
  source 1..21: mol_type = other RNA
gataaaggctactgttggata

SEQ ID NO: 128 - RNA, 21 nt, synthetic construct
  source 1..21: mol_type = other RNA
ataaaggctactgttggatta

SEQ ID NO: 129 - RNA, 21 nt, synthetic construct
  source 1..21: mol_type = other RNA
aaggctactgttggattgata

SEQ ID NO: 130 - RNA, 21 nt, synthetic construct
  source 1..21: mol_type = other RNA
aggctactgttggattgatta

SEQ ID NO: 131 - RNA, 21 nt, synthetic construct
  source 1..21: mol_type = other RNA
ggctactgttggattgattca

SEQ ID NO: 132 - RNA, 21 nt, synthetic construct
  source 1..21: mol_type = other RNA
gctactgttggattgattcga

SEQ ID NO: 133 - RNA, 21 nt, synthetic construct
  source 1..21: mol_type = other RNA
ctactgttggattgattcgaa

SEQ ID NO: 134 - RNA, 21 nt, synthetic construct
  source 1..21: mol_type = other RNA
actgttggattgattcgaaaa

SEQ ID NO: 135 - RNA, 21 nt, synthetic construct
  source 1..21: mol_type = other RNA
ctgttggattgattcgaaata

SEQ ID NO: 136 - RNA, 21 nt, synthetic construct
  source 1..21: mol_type = other RNA
gttggattgattcgaaatcta

SEQ ID NO: 137 - RNA, 21 nt, synthetic construct
  source 1..21: mol_type = other RNA
ttggattgattcgaaatctta

SEQ ID NO: 138 - RNA, 21 nt, synthetic construct
  source 1..21: mol_type = other RNA
ggattgattcgaaatcttgca

SEQ ID NO: 139 - RNA, 21 nt, synthetic construct
  source 1..21: mol_type = other RNA
ttgattcgaaatcttgcccta

SEQ ID NO: 140 - RNA, 21 nt, synthetic construct
  source 1..21: mol_type = other RNA
attccacgactagttcagtta

SEQ ID NO: 141 - RNA, 21 nt, synthetic construct
  source 1..21: mol_type = other RNA
ccacgactagttcagttgcta

SEQ ID NO: 142 - RNA, 21 nt, synthetic construct
  source 1..21: mol_type = other RNA
ttcagttgcttgttcgtgcaa

SEQ ID NO: 143 - RNA, 21 nt, synthetic construct
  source 1..21: mol_type = other RNA
ggacacagcagcaatttgtga

SEQ ID NO: 144 - RNA, 21 nt, synthetic construct
  source 1..21: mol_type = other RNA
atcctagctcgggatgttcaa

SEQ ID NO: 145 - RNA, 21 nt, synthetic construct
  source 1..21: mol_type = other RNA
agctcgggatgttcacaacca

SEQ ID NO: 146 - RNA, 21 nt, synthetic construct
  source 1..21: mol_type = other RNA
gatgttcacaaccgaattgta

SEQ ID NO: 147 - RNA, 21 nt, synthetic construct
  source 1..21: mol_type = other RNA
tatcagaggactaaataccaa

SEQ ID NO: 148 - RNA, 21 nt, synthetic construct
  source 1..21: mol_type = other RNA
atcagaggactaaataccata

SEQ ID NO: 149 - RNA, 21 nt, synthetic construct
  source 1..21: mol_type = other RNA
tcagaggactaaataccatta

SEQ ID NO: 150 - RNA, 21 nt, synthetic construct
  source 1..21: mol_type = other RNA
gaggactaaataccattccaa

SEQ ID NO: 151 - RNA, 21 nt, synthetic construct
  source 1..21: mol_type = other RNA
ggactaaataccattccatta

SEQ ID NO: 152 - RNA, 21 nt, synthetic construct
  source 1..21: mol_type = other RNA
actaaataccattccattgta

SEQ ID NO: 153 - RNA, 21 nt, synthetic construct
  source 1..21: mol_type = other RNA
ctaaataccattccattgtta

SEQ ID NO: 154 - RNA, 21 nt, synthetic construct
  source 1..21: mol_type = other RNA
taaataccattccattgttta

SEQ ID NO: 155 - RNA, 21 nt, synthetic construct
  source 1..21: mol_type = other RNA
aaataccattccattgtttga

SEQ ID NO: 156 - RNA, 21 nt, synthetic construct
  source 1..21: mol_type = other RNA
aataccattccattgtttgta

SEQ ID NO: 157 - RNA, 21 nt, synthetic construct
  source 1..21: mol_type = other RNA
ataccattccattgtttgtga

SEQ ID NO: 158 - RNA, 21 nt, synthetic construct
  source 1..21: mol_type = other RNA
taccattccattgtttgtgca

SEQ ID NO: 159 - RNA, 21 nt, synthetic construct
  source 1..21: mol_type = other RNA
accattccattgtttgtgcaa

SEQ ID NO: 160 - RNA, 21 nt, synthetic construct
  source 1..21: mol_type = other RNA
ccattccattgtttgtgcaga

SEQ ID NO: 161 - RNA, 21 nt, synthetic construct
  source 1..21: mol_type = other RNA
cattccattgtttgtgcagca

SEQ ID NO: 162 - RNA, 21 nt, synthetic construct
  source 1..21: mol_type = other RNA
tccattgtttgtgcagctgca

SEQ ID NO: 163 - RNA, 21 nt, synthetic construct
  source 1..21: mol_type = other RNA
gtttgtgcagctgctttatta

SEQ ID NO: 164 - RNA, 21 nt, synthetic construct
  source 1..21: mol_type = other RNA
ctcctctgacagagttactta

SEQ ID NO: 165 - RNA, 21 nt, synthetic construct
  source 1..21: mol_type = other RNA
gacagagttacttcactctaa

SEQ ID NO: 166 - RNA, 21 nt, synthetic construct
  source 1..21: mol_type = other RNA
agttacttcactctaggaata

SEQ ID NO: 167 - RNA, 21 nt, synthetic construct
  source 1..21: mol_type = other RNA
gaggacaagccacaagattaa

SEQ ID NO: 168 - RNA, 21 nt, synthetic construct
  source 1..21: mol_type = other RNA
cacaagattacaagaaacgga

SEQ ID NO: 169 - RNA, 21 nt, synthetic construct
  source 1..21: mol_type = other RNA
acaagattacaagaaacggca

SEQ ID NO: 170 - RNA, 21 nt, synthetic construct
  source 1..21: mol_type = other RNA
caagattacaagaaacggcta

SEQ ID NO: 171 - RNA, 21 nt, synthetic construct
  source 1..21: mol_type = other RNA
aagattacaagaaacggctta

SEQ ID NO: 172 - RNA, 21 nt, synthetic construct
  source 1..21: mol_type = other RNA
ttacaagaaacggctttcaga

SEQ ID NO: 173 - RNA, 21 nt, synthetic construct
  source 1..21: mol_type = other RNA
tacaagaaacggctttcagta

SEQ ID NO: 174 - RNA, 21 nt, synthetic construct
  source 1..21: mol_type = other RNA
aaacggctttcagttgagcta

SEQ ID NO: 175 - RNA, 21 nt, synthetic construct
  source 1..21: mol_type = other RNA
gctttcagttgagctgaccaa

SEQ ID NO: 176 - RNA, 21 nt, synthetic construct
  source 1..21: mol_type = other RNA
cttggacttgatattggtgca

SEQ ID NO: 177 - RNA, 21 nt, synthetic construct
  source 1..21: mol_type = other RNA
tatcgccaggatgatcctaga

SEQ ID NO: 178 - RNA, 21 nt, synthetic construct
  source 1..21: mol_type = other RNA
caccaccctggtgctgactaa

SEQ ID NO: 179 - RNA, 21 nt, synthetic construct
  source 1..21: mol_type = other RNA
atcagctggcctggtttgata

SEQ ID NO: 180 - RNA, 21 nt, synthetic construct
  source 1..21: mol_type = other RNA
tcagctggcctggtttgataa

SEQ ID NO: 181 - RNA, 21 nt, synthetic construct
  source 1..21: mol_type = other RNA
ctggcctggtttgatactgaa

SEQ ID NO: 182 - RNA, 21 nt, synthetic construct
  source 1..21: mol_type = other RNA
ctgtaaatcatcctttaggta

SEQ ID NO: 183 - RNA, 21 nt, synthetic construct
  source 1..21: mol_type = other RNA
tgtaaatcatcctttaggtaa

SEQ ID NO: 184 - RNA, 21 nt, synthetic construct
  source 1..21: mol_type = other RNA
aaagacttggttggtagggta

SEQ ID NO: 185 - RNA, 21 nt, synthetic construct
  source 1..21: mol_type = other RNA
actttgaaaggagatgtctta

SEQ ID NO: 186 - RNA, 21 nt, synthetic construct
  source 1..21: mol_type = other RNA
ttctcagatttctggttgtta

SEQ ID NO: 187 - RNA, 21 nt, synthetic construct
  source 1..21: mol_type = other RNA
tctcagatttctggttgttaa

SEQ ID NO: 188 - RNA, 21 nt, synthetic construct
  source 1..21: mol_type = other RNA
ctcagatttctggttgttata

SEQ ID NO: 189 - RNA, 21 nt, synthetic construct
  source 1..21: mol_type = other RNA
gttgttatgtgatcatgtgta

SEQ ID NO: 190 - RNA, 21 nt, synthetic construct
  source 1..21: mol_type = other RNA
ttgttatgtgatcatgtgtga

SEQ ID NO: 191 - RNA, 21 nt, synthetic construct
  source 1..21: mol_type = other RNA
gtgatcatgtgtggaagttaa

SEQ ID NO: 192 - RNA, 21 nt, synthetic construct
  source 1..21: mol_type = other RNA
gatcatgtgtggaagttatta

SEQ ID NO: 193 - RNA, 21 nt, synthetic construct
  source 1..21: mol_type = other RNA
atcatgtgtggaagttattaa

SEQ ID NO: 194 - RNA, 21 nt, synthetic construct
  source 1..21: mol_type = other RNA
tgcaacttaatactcaaatga

SEQ ID NO: 195 - RNA, 21 nt, synthetic construct
  source 1..21: mol_type = other RNA
cctttctctctttatacagca

SEQ ID NO: 196 - RNA, 21 nt, synthetic construct
  source 1..21: mol_type = other RNA
tttatacagctgtattgtcta

SEQ ID NO: 197 - RNA, 21 nt, synthetic construct
  source 1..21: mol_type = other RNA
attgtctgaacttgcattgta

SEQ ID NO: 198 - RNA, 21 nt, synthetic construct
  source 1..21: mol_type = other RNA
ttggcctgtagagttgctgaa

SEQ ID NO: 199 - RNA, 21 nt, synthetic construct
  source 1..21: mol_type = other RNA
agtgcctgacacactaaccaa

SEQ ID NO: 200 - RNA, 21 nt, synthetic construct
  source 1..21: mol_type = other RNA
ctgacacactaaccaagctga

SEQ ID NO: 201 - RNA, 21 nt, synthetic construct
  source 1..21: mol_type = other RNA
taaccaagctgagtttcctaa

SEQ ID NO: 202 - RNA, 21 nt, synthetic construct
  source 1..21: mol_type = other RNA
agctgagtttcctatgggaaa

SEQ ID NO: 203 - RNA, 21 nt, synthetic construct
  source 1..21: mol_type = other RNA
tttcctatgggaacaattgaa

SEQ ID NO: 204 - RNA, 21 nt, synthetic construct
  source 1..21: mol_type = other RNA
gtcgaggagtaacaatacaaa

SEQ ID NO: 205 - RNA, 21 nt, synthetic construct
  source 1..21: mol_type = other RNA
atcaaaccctagccttgctta

SEQ ID NO: 206 - RNA, 21 nt, synthetic construct
  source 1..21: mol_type = other RNA
tttgcttgctttgaagtagca

SEQ ID NO: 207 - RNA, 21 nt, synthetic construct
  source 1..21: mol_type = other RNA
tgcttgctttgaagtagctca

SEQ ID NO: 208 - RNA, 21 nt, synthetic construct
  source 1..21: mol_type = other RNA
gcttgctttgaagtagctcta

SEQ ID NO: 209 - RNA, 21 nt, synthetic construct
  source 1..21: mol_type = other RNA
aagtctctcgtagtgttaaga

SEQ ID NO: 210 - RNA, 21 nt, synthetic construct
  source 1..21: mol_type = other RNA
tctctcgtagtgttaagttaa

SEQ ID NO: 211 - RNA, 21 nt, synthetic construct
  source 1..21: mol_type = other RNA
ctctcgtagtgttaagttata

SEQ ID NO: 212 - RNA, 21 nt, synthetic construct
  source 1..21: mol_type = other RNA
ctcgtagtgttaagttataga

SEQ ID NO: 213 - RNA, 21 nt, synthetic construct
  source 1..21: mol_type = other RNA
cgtagtgttaagttatagtga

SEQ ID NO: 214 - RNA, 21 nt, synthetic construct
  source 1..21: mol_type = other RNA
tagtgttaagttatagtgaaa

SEQ ID NO: 215 - RNA, 21 nt, synthetic construct
  source 1..21: mol_type = other RNA
gtgaatactgctacagcaata

SEQ ID NO: 216 - RNA, 21 nt, synthetic construct
  source 1..21: mol_type = other RNA
ctgctacagcaatttctaata

SEQ ID NO: 217 - RNA, 21 nt, synthetic construct
  source 1..21: mol_type = other RNA
gaattgagtaatggtgtagaa

SEQ ID NO: 218 - RNA, 21 nt, synthetic construct
  source 1..21: mol_type = other RNA
ttgagtaatggtgtagaacaa

SEQ ID NO: 219 - RNA, 21 nt, synthetic construct
  source 1..21: mol_type = other RNA
gagtaatggtgtagaacacta

SEQ ID NO: 220 - RNA, 21 nt, synthetic construct
  source 1..21: mol_type = other RNA
agtaatggtgtagaacactaa

SEQ ID NO: 221 - RNA, 21 nt, synthetic construct
  source 1..21: mol_type = other RNA
taatggtgtagaacactaata

SEQ ID NO: 222 - RNA, 21 nt, synthetic construct
  source 1..21: mol_type = other RNA
atggtgtagaacactaattca

SEQ ID NO: 223 - RNA, 21 nt, synthetic construct
  source 1..21: mol_type = other RNA
tggtgtagaacactaattcaa

SEQ ID NO: 224 - RNA, 21 nt, synthetic construct
  source 1..21: mol_type = other RNA
ggtgtagaacactaattcata

SEQ ID NO: 225 - RNA, 21 nt, synthetic construct
  source 1..21: mol_type = other RNA
gtgtagaacactaattcataa

SEQ ID NO: 226 - RNA, 21 nt, synthetic construct
  source 1..21: mol_type = other RNA
tgtagaacactaattcataaa

SEQ ID NO: 227 - RNA, 21 nt, synthetic construct
  source 1..21: mol_type = other RNA
gtagaacactaattcataata

SEQ ID NO: 228 - RNA, 21 nt, synthetic construct
  source 1..21: mol_type = other RNA
tagaacactaattcataatca

SEQ ID NO: 229 - RNA, 21 nt, synthetic construct
  source 1..21: mol_type = other RNA
agaacactaattcataatcaa

SEQ ID NO: 230 - RNA, 21 nt, synthetic construct
  source 1..21: mol_type = other RNA
gaacactaattcataatcaca

SEQ ID NO: 231 - RNA, 21 nt, synthetic construct
  source 1..21: mol_type = other RNA
aacactaattcataatcacta

SEQ ID NO: 232 - RNA, 21 nt, synthetic construct
  source 1..21: mol_type = other RNA
atggtccaattagtttcctta

SEQ ID NO: 233 - RNA, 21 nt, synthetic construct
  source 1..21: mol_type = other RNA
tttgggatatgtatgggtaga

SEQ ID NO: 234 - RNA, 21 nt, synthetic construct
  source 1..21: mol_type = other RNA
tgtatgggtagggtaaatcaa

SEQ ID NO: 235 - RNA, 21 nt, synthetic construct
  source 1..21: mol_type = other RNA
atgggtagggtaaatcagtaa

SEQ ID NO: 236 - RNA, 21 nt, synthetic construct
  source 1..21: mol_type = other RNA
gtagggtaaatcagtaagaga

SEQ ID NO: 237 - RNA, 21 nt, synthetic construct
  source 1..21: mol_type = other RNA
agggtaaatcagtaagaggta

SEQ ID NO: 238 - RNA, 21 nt, synthetic construct
  source 1..21: mol_type = other RNA
gggtaaatcagtaagaggtga

SEQ ID NO: 239 - RNA, 21 nt, synthetic construct
  source 1..21: mol_type = other RNA
gtaaatcagtaagaggtgtta

SEQ ID NO: 240 - RNA, 21 nt, synthetic construct
  source 1..21: mol_type = other RNA
aaatcagtaagaggtgttata

SEQ ID NO: 241 - RNA, 21 nt, synthetic construct
  source 1..21: mol_type = other RNA
aatcagtaagaggtgttatta

SEQ ID NO: 242 - RNA, 21 nt, synthetic construct
  source 1..21: mol_type = other RNA
cagtaagaggtgttatttgga

SEQ ID NO: 243 - RNA, 21 nt, synthetic construct
  source 1..21: mol_type = other RNA
ttggacatggccatggaacca

SEQ ID NO: 244 - RNA, 21 nt, synthetic construct
  source 1..21: mol_type = other RNA
tggactctggaatccattcta

SEQ ID NO: 245 - RNA, 21 nt, synthetic construct
  source 1..21: mol_type = other RNA
ctctgagtggtaaaggcaata

SEQ ID NO: 246 - RNA, 21 nt, synthetic construct
  source 1..21: mol_type = other RNA
tcaagaacaagtagctgataa

SEQ ID NO: 247 - RNA, 21 nt, synthetic construct
  source 1..21: mol_type = other RNA
tagctgatattgatggacaga

SEQ ID NO: 248 - RNA, 21 nt, synthetic construct
  source 1..21: mol_type = other RNA
agctgatattgatggacagta

SEQ ID NO: 249 - RNA, 21 nt, synthetic construct
  source 1..21: mol_type = other RNA
ctgatattgatggacagtata

SEQ ID NO: 250 - RNA, 21 nt, synthetic construct
  source 1..21: mol_type = other RNA
tgatggacagtatgcaatgaa

SEQ ID NO: 251 - RNA, 21 nt, synthetic construct
  source 1..21: mol_type = other RNA
agctcagagggtacgagctga

SEQ ID NO: 252 - RNA, 21 nt, synthetic construct
  source 1..21: mol_type = other RNA
ctcagagggtacgagctgcta

SEQ ID NO: 253 - RNA, 21 nt, synthetic construct
  source 1..21: mol_type = other RNA
agagggtacgagctgctatga

SEQ ID NO: 254 - RNA, 21 nt, synthetic construct
  source 1..21: mol_type = other RNA
gctatgttccctgagacatta

SEQ ID NO: 255 - RNA, 21 nt, synthetic construct
  source 1..21: mol_type = other RNA
agcgtttggctgaaccatcaa

SEQ ID NO: 256 - RNA, 21 nt, synthetic construct
  source 1..21: mol_type = other RNA
tgctgaaacatgcagttgtaa

SEQ ID NO: 257 - RNA, 21 nt, synthetic construct
  source 1..21: mol_type = other RNA
catgcagttgtaaacttgata

SEQ ID NO: 258 - RNA, 21 nt, synthetic construct
  source 1..21: mol_type = other RNA
gcagttgtaaacttgattaaa

SEQ ID NO: 259 - RNA, 21 nt, synthetic construct
  source 1..21: mol_type = other RNA
tgattaactatcaagatgata

SEQ ID NO: 260 - RNA, 21 nt, synthetic construct
  source 1..21: mol_type = other RNA
cagaacttgccacacgtgcaa

SEQ ID NO: 261 - RNA, 21 nt, synthetic construct
  source 1..21: mol_type = other RNA
cacacgtgcaatccctgaaca

SEQ ID NO: 262 - RNA, 21 nt, synthetic construct
  source 1..21: mol_type = other RNA
gtgcaatccctgaactgacaa

SEQ ID NO: 263 - RNA, 21 nt, synthetic construct
  source 1..21: mol_type = other RNA
gaggaccaggtggtggttaaa

SEQ ID NO: 264 - RNA, 21 nt, synthetic construct
  source 1..21: mol_type = other RNA
gtggtggttaataaggctgca

SEQ ID NO: 265 - RNA, 21 nt, synthetic construct
  source 1..21: mol_type = other RNA
tgcagaatacaaatgatgtaa

SEQ ID NO: 266 - RNA, 21 nt, synthetic construct
  source 1..21: mol_type = other RNA
agaatacaaatgatgtagaaa

SEQ ID NO: 267 - RNA, 21 nt, synthetic construct
  source 1..21: mol_type = other RNA
cttgcataacctttcccatca

SEQ ID NO: 268 - RNA, 21 nt, synthetic construct
  source 1..21: mol_type = other RNA
ttgcataacctttcccatcaa

SEQ ID NO: 269 - RNA, 21 nt, synthetic construct
  source 1..21: mol_type = other RNA
ccatctttaagtctggaggca

SEQ ID NO: 270 - RNA, 21 nt, synthetic construct
  source 1..21: mol_type = other RNA
gccattacaactctccacaaa

SEQ ID NO: 271 - RNA, 21 nt, synthetic construct
  source 1..21: mol_type = other RNA
gttgccttgctcaacaaaaca

SEQ ID NO: 272 - RNA, 21 nt, synthetic construct
  source 1..21: mol_type = other RNA
aaatataatgaggacctataa

SEQ ID NO: 273 - RNA, 21 nt, synthetic construct
  source 1..21: mol_type = other RNA
aatataatgaggacctataca

SEQ ID NO: 274 - RNA, 21 nt, synthetic construct
  source 1..21: mol_type = other RNA
gcagagtgctgaaggtgctaa

SEQ ID NO: 275 - RNA, 21 nt, synthetic construct
  source 1..21: mol_type = other RNA
ttctgggttcagatgatataa

SEQ ID NO: 276 - RNA, 21 nt, synthetic construct
  source 1..21: mol_type = other RNA
gatgatataaatgtggtcaca

SEQ ID NO: 277 - RNA, 21 nt, synthetic construct
  source 1..21: mol_type = other RNA
ggaattctttctaacctcaca

SEQ ID NO: 278 - RNA, 21 nt, synthetic construct
  source 1..21: mol_type = other RNA
tctttctaacctcacttgcaa

SEQ ID NO: 279 - RNA, 21 nt, synthetic construct
  source 1..21: mol_type = other RNA
ttctaacctcacttgcaataa

SEQ ID NO: 280 - RNA, 21 nt, synthetic construct
  source 1..21: mol_type = other RNA
tctaacctcacttgcaataaa

SEQ ID NO: 281 - RNA, 21 nt, synthetic construct
  source 1..21: mol_type = other RNA
aagtgggtggtatagaggcta

SEQ ID NO: 282 - RNA, 21 nt, synthetic construct
  source 1..21: mol_type = other RNA
tgggtggtatagaggctctta

SEQ ID NO: 283 - RNA, 21 nt, synthetic construct
  source 1..21: mol_type = other RNA
agcctgccatctgtgctctta

SEQ ID NO: 284 - RNA, 21 nt, synthetic construct
  source 1..21: mol_type = other RNA
gcctgccatctgtgctcttca

SEQ ID NO: 285 - RNA, 21 nt, synthetic construct
  source 1..21: mol_type = other RNA
catctgtgctcttcgtcatca

SEQ ID NO: 286 - RNA, 21 nt, synthetic construct
  source 1..21: mol_type = other RNA
gctcttcgtcatctgaccaga

SEQ ID NO: 287 - RNA, 21 nt, synthetic construct
  source 1..21: mol_type = other RNA
atgcagttcgccttcactata

SEQ ID NO: 288 - RNA, 21 nt, synthetic construct
  source 1..21: mol_type = other RNA
tggttaagctcttacacccaa

SEQ ID NO: 289 - RNA, 21 nt, synthetic construct
  source 1..21: mol_type = other RNA
tgttggattgattcgaaatca

SEQ ID NO: 290 - RNA, 21 nt, synthetic construct
  source 1..21: mol_type = other RNA
cgtgagcagggtgccattcca

SEQ ID NO: 291 - RNA, 21 nt, synthetic construct
  source 1..21: mol_type = other RNA
tcagttgcttgttcgtgcaca

SEQ ID NO: 292 - RNA, 21 nt, synthetic construct
  source 1..21: mol_type = other RNA
agttgcttgttcgtgcacata

SEQ ID NO: 293 - RNA, 21 nt, synthetic construct
  source 1..21: mol_type = other RNA
cagaggactaaataccattca

SEQ ID NO: 294 - RNA, 21 nt, synthetic construct
  source 1..21: mol_type = other RNA
gactaaataccattccattga

SEQ ID NO: 295 - RNA, 21 nt, synthetic construct
  source 1..21: mol_type = other RNA
attccattgtttgtgcagcta

SEQ ID NO: 296 - RNA, 21 nt, synthetic construct
  source 1..21: mol_type = other RNA
ttccattgtttgtgcagctga

SEQ ID NO: 297 - RNA, 21 nt, synthetic construct
  source 1..21: mol_type = other RNA
ccattgtttgtgcagctgcta

SEQ ID NO: 298 - RNA, 21 nt, synthetic construct
  source 1..21: mol_type = other RNA
gccacagctcctctgacagaa

SEQ ID NO: 299 - RNA, 21 nt, synthetic construct
  source 1..21: mol_type = other RNA
aagccacaagattacaagaaa

SEQ ID NO: 300 - RNA, 21 nt, synthetic construct
  source 1..21: mol_type = other RNA
ccacaagattacaagaaacga

SEQ ID NO: 301 - RNA, 21 nt, synthetic construct
  source 1..21: mol_type = other RNA
attacaagaaacggctttcaa

SEQ ID NO: 302 - RNA, 21 nt, synthetic construct
  source 1..21: mol_type = other RNA
ggctttcagttgagctgacca

SEQ ID NO: 303 - RNA, 21 nt, synthetic construct
  source 1..21: mol_type = other RNA
tgagctgaccagctctctcta

SEQ ID NO: 304 - RNA, 21 nt, synthetic construct
  source 1..21: mol_type = other RNA
gagccaatggcttggaatgaa

SEQ ID NO: 305 - RNA, 21 nt, synthetic construct
  source 1..21: mol_type = other RNA
ctgatcttggacttgatatta

SEQ ID NO: 306 - RNA, 21 nt, synthetic construct
  source 1..21: mol_type = other RNA
tggtttgatactgacctgtaa

SEQ ID NO: 307 - RNA, 21 nt, synthetic construct
  source 1..21: mol_type = other RNA
tttgatactgacctgtaaata

SEQ ID NO: 308 - RNA, 21 nt, synthetic construct
  source 1..21: mol_type = other RNA
ggctatttgtaaatctgccaa

SEQ ID NO: 309 - RNA, 21 nt, synthetic construct
  source 1..21: mol_type = other RNA
tttctggttgttatgtgatca

SEQ ID NO: 310 - RNA, 21 nt, synthetic construct
  source 1..21: mol_type = other RNA
taatactcaaatgagtaacaa

SEQ ID NO: 311 - RNA, 21 nt, synthetic construct
  source 1..21: mol_type = other RNA
cagaaagtgcctgacacacta

SEQ ID NO: 312 - RNA, 21 nt, synthetic construct
  source 1..21: mol_type = other RNA
gaaagtgcctgacacactaaa

SEQ ID NO: 313 - RNA, 21 nt, synthetic construct
  source 1..21: mol_type = other RNA
gcctgacacactaaccaagca

SEQ ID NO: 314 - RNA, 21 nt, synthetic construct
  source 1..21: mol_type = other RNA
tgggaacaattgaagtaaaca

SEQ ID NO: 315 - RNA, 21 nt, synthetic construct
  source 1..21: mol_type = other RNA
atggatcacaagatggaatta

SEQ ID NO: 316 - RNA, 21 nt, synthetic construct
  source 1..21: mol_type = other RNA
tttatcaaaccctagccttga

SEQ ID NO: 317 - RNA, 21 nt, synthetic construct
  source 1..21: mol_type = other RNA
tatctgtaatggtactgacta

SEQ ID NO: 318 - RNA, 21 nt, synthetic construct
  source 1..21: mol_type = other RNA
ttgcttgctttgaagtagcta

SEQ ID NO: 319 - RNA, 21 nt, synthetic construct
  source 1..21: mol_type = other RNA
agtgttaagttatagtgaata

SEQ ID NO: 320 - RNA, 21 nt, synthetic construct
  source 1..21: mol_type = other RNA
tgttaagttatagtgaataca

SEQ ID NO: 321 - RNA, 21 nt, synthetic construct
  source 1..21: mol_type = other RNA
gtaatggtgtagaacactaaa

SEQ ID NO: 322 - RNA, 21 nt, synthetic construct
  source 1..21: mol_type = other RNA
aatggtgtagaacactaatta

SEQ ID NO: 323 - RNA, 21 nt, synthetic construct
  source 1..21: mol_type = other RNA
ctaattcataatcactctaaa

SEQ ID NO: 324 - RNA, 21 nt, synthetic construct
  source 1..21: mol_type = other RNA
taaatcagtaagaggtgttaa

SEQ ID NO: 325 - RNA, 23 nt, synthetic construct
  source 1..23: mol_type = other RNA
tggtatacttcaaataccctcag

SEQ ID NO: 326 - RNA, 23 nt, synthetic construct
  source 1..23: mol_type = other RNA
tatggtatacttcaaataccctc

SEQ ID NO: 327 - RNA, 23 nt, synthetic construct
  source 1..23: mol_type = other RNA
  modified_base 7: mod_base = OTHER; note = thymine
ttatggtatacttcaaataccct

SEQ ID NO: 328 - RNA, 23 nt, synthetic construct
  source 1..23: mol_type = other RNA
tgttgtatggtatacttcaaata

SEQ ID NO: 329 - RNA, 23 nt, synthetic construct
  source 1..23: mol_type = other RNA
  modified_base 5: mod_base = OTHER; note = thymine
  modified_base 7: mod_base = OTHER; note = thymine
tagttgtatggtatacttcaaat

SEQ ID NO: 330 - RNA, 23 nt, synthetic construct
  source 1..23: mol_type = other RNA
  modified_base 5: mod_base = OTHER; note = thymine
tgcttgagtagccattgtccacg

SEQ ID NO: 331 - RNA, 23 nt, synthetic construct
  source 1..23: mol_type = other RNA
  modified_base 7: mod_base = OTHER; note = thymine
tcagcttgagtagccattgtcca

SEQ ID NO: 332 - RNA, 23 nt, synthetic construct
  source 1..23: mol_type = other RNA
  modified_base 7: mod_base = OTHER; note = thymine
ttcagcttgagtagccattgtcc

SEQ ID NO: 333 - RNA, 23 nt, synthetic construct
  source 1..23: mol_type = other RNA
tcaactccatcaaatcagcttga

SEQ ID NO: 334 - RNA, 23 nt, synthetic construct
  source 1..23: mol_type = other RNA
  modified_base 7: mod_base = OTHER; note = thymine
tccaactccatcaaatcagcttg

SEQ ID NO: 335 - RNA, 23 nt, synthetic construct
  source 1..23: mol_type = other RNA
  modified_base 5: mod_base = OTHER; note = thymine
  modified_base 12: mod_base = OTHER; note = thymine
tcctttaccactcagagaaggag

SEQ ID NO: 336 - RNA, 23 nt, synthetic construct
  source 1..23: mol_type = other RNA
  modified_base 5: mod_base = OTHER; note = thymine
  modified_base 7: mod_base = OTHER; note = thymine
ttgttcttgagtgaaggactgag

SEQ ID NO: 337 - RNA, 23 nt, synthetic construct
  source 1..23: mol_type = other RNA
  modified_base 7: mod_base = OTHER; note = thymine
  modified_base 12: mod_base = OTHER; note = thymine
tctacttgttcttgagtgaagga

SEQ ID NO: 338 - RNA, 23 nt, synthetic construct
  source 1..23: mol_type = other RNA
  modified_base 12: mod_base = OTHER; note = thymine
tcagctacttgttcttgagtgaa

SEQ ID NO: 339 - RNA, 23 nt, synthetic construct
  source 1..23: mol_type = other RNA
ttgtccatcaatatcagctactt

SEQ ID NO: 340 - RNA, 23 nt, synthetic construct
  source 1..23: mol_type = other RNA
tattgcatactgtccatcaatat

SEQ ID NO: 341 - RNA, 23 nt, synthetic construct
  source 1..23: mol_type = other RNA
  modified_base 5: mod_base = OTHER; note = thymine
tagctcgagtcattgcatactgt

SEQ ID NO: 342 - RNA, 23 nt, synthetic construct
  source 1..23: mol_type = other RNA
tggaacatagcagctcgtaccct

SEQ ID NO: 343 - RNA, 23 nt, synthetic construct
  source 1..23: mol_type = other RNA
tcagggaacatagcagctcgtac

SEQ ID NO: 344 - RNA, 23 nt, synthetic construct
  source 1..23: mol_type = other RNA
  modified_base 5: mod_base = OTHER; note = thymine
  modified_base 12: mod_base = OTHER; note = thymine
tatctaatgtctcagggaacata

SEQ ID NO: 345 - RNA, 23 nt, synthetic construct
  source 1..23: mol_type = other RNA
  modified_base 5: mod_base = OTHER; note = thymine
  modified_base 7: mod_base = OTHER; note = thymine
ttcatctaatgtctcagggaaca

SEQ ID NO: 346 - RNA, 23 nt, synthetic construct
  source 1..23: mol_type = other RNA
  modified_base 5: mod_base = OTHER; note = thymine
  modified_base 7: mod_base = OTHER; note = thymine
tggatctgcatgccctcatctaa

SEQ ID NO: 347 - RNA, 23 nt, synthetic construct
  source 1..23: mol_type = other RNA
  modified_base 7: mod_base = OTHER; note = thymine
tgacattagtgggatgagcagca

SEQ ID NO: 348 - RNA, 23 nt, synthetic construct
  source 1..23: mol_type = other RNA
  modified_base 5: mod_base = OTHER; note = thymine
tgtttcagcatctgtgatggttc

SEQ ID NO: 349 - RNA, 23 nt, synthetic construct
  source 1..23: mol_type = other RNA
  modified_base 5: mod_base = OTHER; note = thymine
  modified_base 7: mod_base = OTHER; note = thymine
tatgtttcagcatctgtgatggt

SEQ ID NO: 350 - RNA, 23 nt, synthetic construct
  source 1..23: mol_type = other RNA
  modified_base 7: mod_base = OTHER; note = thymine
tacaactgcatgtttcagcatct

SEQ ID NO: 351 - RNA, 23 nt, synthetic construct
  source 1..23: mol_type = other RNA
  modified_base 7: mod_base = OTHER; note = thymine
ttcaagtttacaactgcatgttt

SEQ ID NO: 352 - RNA, 23 nt, synthetic construct
  source 1..23: mol_type = other RNA
taatcaagtttacaactgcatgt

SEQ ID NO: 353 - RNA, 23 nt, synthetic construct
  source 1..23: mol_type = other RNA
  modified_base 7: mod_base = OTHER; note = thymine
ttcagttcagggattgcacgtgt

SEQ ID NO: 354 - RNA, 23 nt, synthetic construct
  source 1..23: mol_type = other RNA
  modified_base 5: mod_base = OTHER; note = thymine
tttgtcagttcagggattgcacg

SEQ ID NO: 355 - RNA, 23 nt, synthetic construct
  source 1..23: mol_type = other RNA
  modified_base 5: mod_base = OTHER; note = thymine
tttattaaccaccacctggtcct

SEQ ID NO: 356 - RNA, 23 nt, synthetic construct
  source 1..23: mol_type = other RNA
  modified_base 2: mod_base = OTHER; note = thymine
  modified_base 5: mod_base = OTHER; note = thymine
tttattaaccaccacctggtcct

SEQ ID NO: 357 - RNA, 23 nt, synthetic construct
  source 1..23: mol_type = other RNA
  modified_base 5: mod_base = OTHER; note = thymine
  modified_base 7: mod_base = OTHER; note = thymine
tccttattaaccaccacctggtc

SEQ ID NO: 358 - RNA, 23 nt, synthetic construct
  source 1..23: mol_type = other RNA
  modified_base 7: mod_base = OTHER; note = thymine
tataactgcagccttattaacca

SEQ ID NO: 359 - RNA, 23 nt, synthetic construct
  source 1..23: mol_type = other RNA
tatagcagacaccatctgaggag

SEQ ID NO: 360 - RNA, 23 nt, synthetic construct
  source 1..23: mol_type = other RNA
  modified_base 5: mod_base = OTHER; note = thymine
tcaatagcagacaccatctgagg

SEQ ID NO: 361 - RNA, 23 nt, synthetic construct
  source 1..23: mol_type = other RNA
  modified_base 7: mod_base = OTHER; note = thymine
ttacaatagcagacaccatctga

SEQ ID NO: 362 - RNA, 23 nt, synthetic construct
  source 1..23: mol_type = other RNA
  modified_base 2: mod_base = OTHER; note = thymine
  modified_base 7: mod_base = OTHER; note = thymine
ttacaatagcagacaccatctga

SEQ ID NO: 363 - RNA, 23 nt, synthetic construct
  source 1..23: mol_type = other RNA
  modified_base 5: mod_base = OTHER; note = thymine
  modified_base 7: mod_base = OTHER; note = thymine
tttgtattctgcatggtacgtac

SEQ ID NO: 364 - RNA, 23 nt, synthetic construct
  source 1..23: mol_type = other RNA
  modified_base 2: mod_base = OTHER; note = thymine
  modified_base 5: mod_base = OTHER; note = thymine
  modified_base 7: mod_base = OTHER; note = thymine
tttgtattctgcatggtacgtac

SEQ ID NO: 365 - RNA, 23 nt, synthetic construct
  source 1..23: mol_type = other RNA
ttttgtattctgcatggtacgta

SEQ ID NO: 366 - RNA, 23 nt, synthetic construct
  source 1..23: mol_type = other RNA
  modified_base 5: mod_base = OTHER; note = thymine
  modified_base 7: mod_base = OTHER; note = thymine
tatttgtattctgcatggtacgt

SEQ ID NO: 367 - RNA, 23 nt, synthetic construct
  source 1..23: mol_type = other RNA
  modified_base 5: mod_base = OTHER; note = thymine
tcatttgtattctgcatggtacg

SEQ ID NO: 368 - RNA, 23 nt, synthetic construct
  source 1..23: mol_type = other RNA
  modified_base 2: mod_base = OTHER; note = thymine
  modified_base 5: mod_base = OTHER; note = thymine
  modified_base 7: mod_base = OTHER; note = thymine
  modified_base 12: mod_base = OTHER; note = thymine
ttcatttgtattctgcatggtac

SEQ ID NO: 369 - RNA, 23 nt, synthetic construct
  source 1..23: mol_type = other RNA
  modified_base 7: mod_base = OTHER; note = thymine
  modified_base 12: mod_base = OTHER; note = thymine
tatcatttgtattctgcatggta

SEQ ID NO: 370 - RNA, 23 nt, synthetic construct
  source 1..23: mol_type = other RNA
  modified_base 7: mod_base = OTHER; note = thymine
tcatcatttgtattctgcatggt

SEQ ID NO: 371 - RNA, 23 nt, synthetic construct
  source 1..23: mol_type = other RNA
  modified_base 5: mod_base = OTHER; note = thymine
tacatcatttgtattctgcatgg

SEQ ID NO: 372 - RNA, 23 nt, synthetic construct
  source 1..23: mol_type = other RNA
  modified_base 7: mod_base = OTHER; note = thymine
  modified_base 12: mod_base = OTHER; note = thymine
tctacatcatttgtattctgcat

SEQ ID NO: 373 - RNA, 23 nt, synthetic construct
  source 1..23: mol_type = other RNA
ttctacatcatttgtattctgca

SEQ ID NO: 374 - RNA, 23 nt, synthetic construct
  source 1..23: mol_type = other RNA
  modified_base 12: mod_base = OTHER; note = thymine
taacgagctgtttctacatcatt

SEQ ID NO: 375 - RNA, 23 nt, synthetic construct
  source 1..23: mol_type = other RNA
  modified_base 12: mod_base = OTHER; note = thymine
tcaacgagctgtttctacatcat

SEQ ID NO: 376 - RNA, 23 nt, synthetic construct
  source 1..23: mol_type = other RNA
  modified_base 7: mod_base = OTHER; note = thymine
tcagacttaaagatggccagtaa

SEQ ID NO: 377 - RNA, 23 nt, synthetic construct
  source 1..23: mol_type = other RNA
tccagacttaaagatggccagta

SEQ ID NO: 378 - RNA, 23 nt, synthetic construct
  source 1..23: mol_type = other RNA
ttccagacttaaagatggccagt

SEQ ID NO: 379 - RNA, 23 nt, synthetic construct
  source 1..23: mol_type = other RNA
tctccagacttaaagatggccag

SEQ ID NO: 380 - RNA, 23 nt, synthetic construct
  source 1..23: mol_type = other RNA
  modified_base 12: mod_base = OTHER; note = thymine
tcctccagacttaaagatggcca

SEQ ID NO: 381 - RNA, 23 nt, synthetic construct
  source 1..23: mol_type = other RNA
  modified_base 7: mod_base = OTHER; note = thymine
  modified_base 12: mod_base = OTHER; note = thymine
tcagaatccactggtgaaccaag

SEQ ID NO: 382 - RNA, 23 nt, synthetic construct
  source 1..23: mol_type = other RNA
tacaacacagaatccactggtga

SEQ ID NO: 383 - RNA, 23 nt, synthetic construct
  source 1..23: mol_type = other RNA
  modified_base 7: mod_base = OTHER; note = thymine
tccagctaaacgcactgccattt

SEQ ID NO: 384 - RNA, 23 nt, synthetic construct
  source 1..23: mol_type = other RNA
  modified_base 5: mod_base = OTHER; note = thymine
  modified_base 7: mod_base = OTHER; note = thymine
ttgttttgttgagcaaggcaacc

SEQ ID NO: 385 - RNA, 23 nt, synthetic construct
  source 1..23: mol_type = other RNA
  modified_base 2: mod_base = OTHER; note = thymine
  modified_base 5: mod_base = OTHER; note = thymine
  modified_base 7: mod_base = OTHER; note = thymine
tttgttttgttgagcaaggcaac

SEQ ID NO: 386 - RNA, 23 nt, synthetic construct
  source 1..23: mol_type = other RNA
  modified_base 5: mod_base = OTHER; note = thymine
  modified_base 7: mod_base = OTHER; note = thymine
tttgttttgttgagcaaggcaac

SEQ ID NO: 387 - RNA, 23 nt, synthetic construct
  source 1..23: mol_type = other RNA
  modified_base 7: mod_base = OTHER; note = thymine
ttttgttttgttgagcaaggcaa

SEQ ID NO: 388 - RNA, 23 nt, synthetic construct
  source 1..23: mol_type = other RNA
  modified_base 7: mod_base = OTHER; note = thymine
tcgtaatagccaagaatttaaca

SEQ ID NO: 389 - RNA, 23 nt, synthetic construct
  source 1..23: mol_type = other RNA
  modified_base 5: mod_base = OTHER; note = thymine
tctgtcgtaatagccaagaattt

SEQ ID NO: 390 - RNA, 23 nt, synthetic construct
  source 1..23: mol_type = other RNA
  modified_base 7: mod_base = OTHER; note = thymine
tggcagtctgtcgtaatagccaa

SEQ ID NO: 391 - RNA, 23 nt, synthetic construct
  source 1..23: mol_type = other RNA
ttttgaaggcagtctgtcgtaat

SEQ ID NO: 392 - RNA, 23 nt, synthetic construct
  source 1..23: mol_type = other RNA
  modified_base 7: mod_base = OTHER; note = thymine
  modified_base 12: mod_base = OTHER; note = thymine
tcctcattatatttactaaagct

SEQ ID NO: 393 - RNA, 23 nt, synthetic construct
  source 1..23: mol_type = other RNA
  modified_base 5: mod_base = OTHER; note = thymine
  modified_base 7: mod_base = OTHER; note = thymine
taagtataggtcctcattatatt

SEQ ID NO: 394 - RNA, 23 nt, synthetic construct
  source 1..23: mol_type = other RNA
  modified_base 7: mod_base = OTHER; note = thymine
taagcttgcattccaccagcttc

SEQ ID NO: 395 - RNA, 23 nt, synthetic construct
  source 1..23: mol_type = other RNA
taagacgttgacttggatctgtc

SEQ ID NO: 396 - RNA, 23 nt, synthetic construct
  source 1..23: mol_type = other RNA
ttgaacaagacgttgacttggat

SEQ ID NO: 397 - RNA, 23 nt, synthetic construct
  source 1..23: mol_type = other RNA
  modified_base 2: mod_base = OTHER; note = thymine
ttgaacaagacgttgacttggat

SEQ ID NO: 398 - RNA, 23 nt, synthetic construct
  source 1..23: mol_type = other RNA
  modified_base 7: mod_base = OTHER; note = thymine
tgagagtccaaagacagttctga

SEQ ID NO: 399 - RNA, 23 nt, synthetic construct
  source 1..23: mol_type = other RNA
  modified_base 7: mod_base = OTHER; note = thymine
tttagttgcagcatctgaaagat

SEQ ID NO: 400 - RNA, 23 nt, synthetic construct
  source 1..23: mol_type = other RNA
  modified_base 5: mod_base = OTHER; note = thymine
ttgtttagttgcagcatctgaaa

SEQ ID NO: 401 - RNA, 23 nt, synthetic construct
  source 1..23: mol_type = other RNA
  modified_base 5: mod_base = OTHER; note = thymine
  modified_base 7: mod_base = OTHER; note = thymine
ttcctgtttagttgcagcatctg

SEQ ID NO: 402 - RNA, 23 nt, synthetic construct
  source 1..23: mol_type = other RNA
  modified_base 5: mod_base = OTHER; note = thymine
  modified_base 12: mod_base = OTHER; note = thymine
tcccttcctgtttagttgcagca

SEQ ID NO: 403 - RNA, 23 nt, synthetic construct
  source 1..23: mol_type = other RNA
taggagaccttccatcccttcct

SEQ ID NO: 404 - RNA, 23 nt, synthetic construct
  source 1..23: mol_type = other RNA
  modified_base 5: mod_base = OTHER; note = thymine
tatatcatctgaacccagaagct

SEQ ID NO: 405 - RNA, 23 nt, synthetic construct
  source 1..23: mol_type = other RNA
  modified_base 7: mod_base = OTHER; note = thymine
taagaattccagctgcacaggtg

SEQ ID NO: 406 - RNA, 23 nt, synthetic construct
  source 1..23: mol_type = other RNA
tgaaagaattccagctgcacagg

SEQ ID NO: 407 - RNA, 23 nt, synthetic construct
  source 1..23: mol_type = other RNA
  modified_base 5: mod_base = OTHER; note = thymine
taagtgaggttagaaagaattcc

SEQ ID NO: 408 - RNA, 23 nt, synthetic construct
  source 1..23: mol_type = other RNA
  modified_base 7: mod_base = OTHER; note = thymine
  modified_base 12: mod_base = OTHER; note = thymine
tgcaagtgaggttagaaagaatt

SEQ ID NO: 409 - RNA, 23 nt, synthetic construct
  source 1..23: mol_type = other RNA
tttgcaagtgaggttagaaagaa

SEQ ID NO: 410 - RNA, 23 nt, synthetic construct
  source 1..23: mol_type = other RNA
tattgcaagtgaggttagaaaga

SEQ ID NO: 411 - RNA, 23 nt, synthetic construct
  source 1..23: mol_type = other RNA
  modified_base 7: mod_base = OTHER; note = thymine
tattattgcaagtgaggttagaa

SEQ ID NO: 412 - RNA, 23 nt, synthetic construct
  source 1..23: mol_type = other RNA
  modified_base 5: mod_base = OTHER; note = thymine
  modified_base 7: mod_base = OTHER; note = thymine
taattattgcaagtgaggttaga

SEQ ID NO: 413 - RNA, 23 nt, synthetic construct
  source 1..23: mol_type = other RNA
  modified_base 2: mod_base = OTHER; note = thymine
  modified_base 5: mod_base = OTHER; note = thymine
ttaattattgcaagtgaggttag

SEQ ID NO: 414 - RNA, 23 nt, synthetic construct
  source 1..23: mol_type = other RNA
  modified_base 7: mod_base = OTHER; note = thymine
tataattattgcaagtgaggtta

SEQ ID NO: 415 - RNA, 23 nt, synthetic construct
  source 1..23: mol_type = other RNA
  modified_base 2: mod_base = OTHER; note = thymine
  modified_base 7: mod_base = OTHER; note = thymine
ttataattattgcaagtgaggtt

SEQ ID NO: 416 - RNA, 23 nt, synthetic construct
  source 1..23: mol_type = other RNA
  modified_base 5: mod_base = OTHER; note = thymine
tttataattattgcaagtgaggt

SEQ ID NO: 417 - RNA, 23 nt, synthetic construct
  source 1..23: mol_type = other RNA
  modified_base 2: mod_base = OTHER; note = thymine
  modified_base 5: mod_base = OTHER; note = thymine
  modified_base 12: mod_base = OTHER; note = thymine
tttataattattgcaagtgaggt

SEQ ID NO: 418 - RNA, 23 nt, synthetic construct
  source 1..23: mol_type = other RNA
  modified_base 12: mod_base = OTHER; note = thymine
tcttataattattgcaagtgagg

SEQ ID NO: 419 - RNA, 23 nt, synthetic construct
  source 1..23: mol_type = other RNA
  modified_base 2: mod_base = OTHER; note = thymine
  modified_base 5: mod_base = OTHER; note = thymine
  modified_base 7: mod_base = OTHER; note = thymine
ttcttataattattgcaagtgag

SEQ ID NO: 420 - RNA, 23 nt, synthetic construct
  source 1..23: mol_type = other RNA
  modified_base 5: mod_base = OTHER; note = thymine
  modified_base 7: mod_base = OTHER; note = thymine
tgcctctataccacccacttggc

SEQ ID NO: 421 - RNA, 23 nt, synthetic construct
  source 1..23: mol_type = other RNA
taggacagtacgcacaagagcct

SEQ ID NO: 422 - RNA, 23 nt, synthetic construct
  source 1..23: mol_type = other RNA
tcgaagagcacagatggcaggct

SEQ ID NO: 423 - RNA, 23 nt, synthetic construct
  source 1..23: mol_type = other RNA
tacgaagagcacagatggcaggc

SEQ ID NO: 424 - RNA, 23 nt, synthetic construct
  source 1..23: mol_type = other RNA
tgacgaagagcacagatggcagg

SEQ ID NO: 425 - RNA, 23 nt, synthetic construct
  source 1..23: mol_type = other RNA
  modified_base 2: mod_base = OTHER; note = thymine
ttgacgaagagcacagatggcag

SEQ ID NO: 426 - RNA, 23 nt, synthetic construct
  source 1..23: mol_type = other RNA
tatgacgaagagcacagatggca

SEQ ID NO: 427 - RNA, 23 nt, synthetic construct
  source 1..23: mol_type = other RNA
  modified_base 5: mod_base = OTHER; note = thymine
tagatgacgaagagcacagatgg

SEQ ID NO: 428 - RNA, 23 nt, synthetic construct
  source 1..23: mol_type = other RNA
tcagatgacgaagagcacagatg

SEQ ID NO: 429 - RNA, 23 nt, synthetic construct
  source 1..23: mol_type = other RNA
  modified_base 7: mod_base = OTHER; note = thymine
ttcagatgacgaagagcacagat

SEQ ID NO: 430 - RNA, 23 nt, synthetic construct
  source 1..23: mol_type = other RNA
tgtcagatgacgaagagcacaga

SEQ ID NO: 431 - RNA, 23 nt, synthetic construct
  source 1..23: mol_type = other RNA
ttaaccacaactggtagtccata

SEQ ID NO: 432 - RNA, 23 nt, synthetic construct
  source 1..23: mol_type = other RNA
tcttaaccacaactggtagtcca

SEQ ID NO: 433 - RNA, 23 nt, synthetic construct
  source 1..23: mol_type = other RNA
tggtgtaagagcttaaccacaac

SEQ ID NO: 434 - RNA, 23 nt, synthetic construct
  source 1..23: mol_type = other RNA
tatccaacagtagcctttatcag

SEQ ID NO: 435 - RNA, 23 nt, synthetic construct
  source 1..23: mol_type = other RNA
taatccaacagtagcctttatca

SEQ ID NO: 436 - RNA, 23 nt, synthetic construct
  source 1..23: mol_type = other RNA
  modified_base 12: mod_base = OTHER; note = thymine
taatccaacagtagcctttatca

SEQ ID NO: 437 - RNA, 23 nt, synthetic construct
  source 1..23: mol_type = other RNA
  modified_base 7: mod_base = OTHER; note = thymine
tatcaatccaacagtagccttta

SEQ ID NO: 438 - RNA, 23 nt, synthetic construct
  source 1..23: mol_type = other RNA
taatcaatccaacagtagccttt

SEQ ID NO: 439 - RNA, 23 nt, synthetic construct
  source 1..23: mol_type = other RNA
  modified_base 5: mod_base = OTHER; note = thymine
tgaatcaatccaacagtagcctt

SEQ ID NO: 440 - RNA, 23 nt, synthetic construct
  source 1..23: mol_type = other RNA
tcgaatcaatccaacagtagcct

SEQ ID NO: 441 - RNA, 23 nt, synthetic construct
  source 1..23: mol_type = other RNA
  modified_base 2: mod_base = OTHER; note = thymine
  modified_base 7: mod_base = OTHER; note = thymine
ttcgaatcaatccaacagtagcc

SEQ ID NO: 442 - RNA, 23 nt, synthetic construct
  source 1..23: mol_type = other RNA
  modified_base 2: mod_base = OTHER; note = thymine
ttttcgaatcaatccaacagtag

SEQ ID NO: 443 - RNA, 23 nt, synthetic construct
  source 1..23: mol_type = other RNA
  modified_base 5: mod_base = OTHER; note = thymine
tatttcgaatcaatccaacagta

SEQ ID NO: 444 - RNA, 23 nt, synthetic construct
  source 1..23: mol_type = other RNA
  modified_base 5: mod_base = OTHER; note = thymine
  modified_base 7: mod_base = OTHER; note = thymine
  modified_base 12: mod_base = OTHER; note = thymine
tagatttcgaatcaatccaacag

SEQ ID NO: 445 - RNA, 23 nt, synthetic construct
  source 1..23: mol_type = other RNA
  modified_base 5: mod_base = OTHER; note = thymine
  modified_base 7: mod_base = OTHER; note = thymine
tagatttcgaatcaatccaacag

SEQ ID NO: 446 - RNA, 23 nt, synthetic construct
  source 1..23: mol_type = other RNA
  modified_base 7: mod_base = OTHER; note = thymine
taagatttcgaatcaatccaaca

SEQ ID NO: 447 - RNA, 23 nt, synthetic construct
  source 1..23: mol_type = other RNA
tgcaagatttcgaatcaatccaa

SEQ ID NO: 448 - RNA, 23 nt, synthetic construct
  source 1..23: mol_type = other RNA
tagggcaagatttcgaatcaatc

SEQ ID NO: 449 - RNA, 23 nt, synthetic construct
  source 1..23: mol_type = other RNA
  modified_base 5: mod_base = OTHER; note = thymine
taactgaactagtcgtggaatgg

SEQ ID NO: 450 - RNA, 23 nt, synthetic construct
  source 1..23: mol_type = other RNA
tagcaactgaactagtcgtggaa

SEQ ID NO: 451 - RNA, 23 nt, synthetic construct
  source 1..23: mol_type = other RNA
  modified_base 2: mod_base = OTHER; note = thymine
ttgcacgaacaagcaactgaact

SEQ ID NO: 452 - RNA, 23 nt, synthetic construct
  source 1..23: mol_type = other RNA
  modified_base 12: mod_base = OTHER; note = thymine
tcacaaattgctgctgtgtccca

SEQ ID NO: 453 - RNA, 23 nt, synthetic construct
  source 1..23: mol_type = other RNA
ttgaacatcccgagctaggatgt

SEQ ID NO: 454 - RNA, 23 nt, synthetic construct
  source 1..23: mol_type = other RNA
  modified_base 5: mod_base = OTHER; note = thymine
  modified_base 7: mod_base = OTHER; note = thymine
tggttgtgaacatcccgagctag

SEQ ID NO: 455 - RNA, 23 nt, synthetic construct
  source 1..23: mol_type = other RNA
  modified_base 7: mod_base = OTHER; note = thymine
  modified_base 12: mod_base = OTHER; note = thymine
tacaattcggttgtgaacatccc

SEQ ID NO: 456 - RNA, 23 nt, synthetic construct
  source 1..23: mol_type = other RNA
  modified_base 5: mod_base = OTHER; note = thymine
  modified_base 7: mod_base = OTHER; note = thymine
ttggtatttagtcctctgataac

SEQ ID NO: 457 - RNA, 23 nt, synthetic construct
  source 1..23: mol_type = other RNA
tatggtatttagtcctctgataa

SEQ ID NO: 458 - RNA, 23 nt, synthetic construct
  source 1..23: mol_type = other RNA
  modified_base 7: mod_base = OTHER; note = thymine
taatggtatttagtcctctgata

SEQ ID NO: 459 - RNA, 23 nt, synthetic construct
  source 1..23: mol_type = other RNA
  modified_base 7: mod_base = OTHER; note = thymine
ttggaatggtatttagtcctctg

SEQ ID NO: 460 - RNA, 23 nt, synthetic construct
  source 1..23: mol_type = other RNA
  modified_base 2: mod_base = OTHER; note = thymine
  modified_base 7: mod_base = OTHER; note = thymine
  modified_base 12: mod_base = OTHER; note = thymine
ttggaatggtatttagtcctctg

SEQ ID NO: 461 - RNA, 23 nt, synthetic construct
  source 1..23: mol_type = other RNA
  modified_base 12: mod_base = OTHER; note = thymine
taatggaatggtatttagtcctc

SEQ ID NO: 462 - RNA, 23 nt, synthetic construct
  source 1..23: mol_type = other RNA
tacaatggaatggtatttagtcc

SEQ ID NO: 463 - RNA, 23 nt, synthetic construct
  source 1..23: mol_type = other RNA
  modified_base 7: mod_base = OTHER; note = thymine
  modified_base 12: mod_base = OTHER; note = thymine
taacaatggaatggtatttagtc

SEQ ID NO: 464 - RNA, 23 nt, synthetic construct
  source 1..23: mol_type = other RNA
taaacaatggaatggtatttagt

SEQ ID NO: 465 - RNA, 23 nt, synthetic construct
  source 1..23: mol_type = other RNA
tcaaacaatggaatggtatttag

SEQ ID NO: 466 - RNA, 23 nt, synthetic construct
  source 1..23: mol_type = other RNA
tacaaacaatggaatggtattta

SEQ ID NO: 467 - RNA, 23 nt, synthetic construct
  source 1..23: mol_type = other RNA
tcacaaacaatggaatggtattt

SEQ ID NO: 468 - RNA, 23 nt, synthetic construct
  source 1..23: mol_type = other RNA
  modified_base 12: mod_base = OTHER; note = thymine
tgcacaaacaatggaatggtatt

SEQ ID NO: 469 - RNA, 23 nt, synthetic construct
  source 1..23: mol_type = other RNA
  modified_base 2: mod_base = OTHER; note = thymine
ttgcacaaacaatggaatggtat

SEQ ID NO: 470 - RNA, 23 nt, synthetic construct
  source 1..23: mol_type = other RNA
ttgcacaaacaatggaatggtat

SEQ ID NO: 471 - RNA, 23 nt, synthetic construct
  source 1..23: mol_type = other RNA
tctgcacaaacaatggaatggta

SEQ ID NO: 472 - RNA, 23 nt, synthetic construct
  source 1..23: mol_type = other RNA
tgctgcacaaacaatggaatggt

SEQ ID NO: 473 - RNA, 23 nt, synthetic construct
  source 1..23: mol_type = other RNA
  modified_base 7: mod_base = OTHER; note = thymine
tgcagctgcacaaacaatggaat

SEQ ID NO: 474 - RNA, 23 nt, synthetic construct
  source 1..23: mol_type = other RNA
taataaagcagctgcacaaacaa

SEQ ID NO: 475 - RNA, 23 nt, synthetic construct
  source 1..23: mol_type = other RNA
  modified_base 5: mod_base = OTHER; note = thymine
taagtaactctgtcagaggagct

SEQ ID NO: 476 - RNA, 23 nt, synthetic construct
  source 1..23: mol_type = other RNA
  modified_base 7: mod_base = OTHER; note = thymine
ttagagtgaagtaactctgtcag

SEQ ID NO: 477 - RNA, 23 nt, synthetic construct
  source 1..23: mol_type = other RNA
  modified_base 7: mod_base = OTHER; note = thymine
tattcctagagtgaagtaactct

SEQ ID NO: 478 - RNA, 23 nt, synthetic construct
  source 1..23: mol_type = other RNA
  modified_base 5: mod_base = OTHER; note = thymine
  modified_base 7: mod_base = OTHER; note = thymine
ttaatcttgtggcttgtcctcag

SEQ ID NO: 479 - RNA, 23 nt, synthetic construct
  source 1..23: mol_type = other RNA
  modified_base 5: mod_base = OTHER; note = thymine
  modified_base 7: mod_base = OTHER; note = thymine
  modified_base 12: mod_base = OTHER; note = thymine
tccgtttcttgtaatcttgtggc

SEQ ID NO: 480 - RNA, 23 nt, synthetic construct
  source 1..23: mol_type = other RNA
  modified_base 7: mod_base = OTHER; note = thymine
tgccgtttcttgtaatcttgtgg

SEQ ID NO: 481 - RNA, 23 nt, synthetic construct
  source 1..23: mol_type = other RNA
  modified_base 7: mod_base = OTHER; note = thymine
  modified_base 12: mod_base = OTHER; note = thymine
tagccgtttcttgtaatcttgtg

SEQ ID NO: 482 - RNA, 23 nt, synthetic construct
  source 1..23: mol_type = other RNA
  modified_base 12: mod_base = OTHER; note = thymine
taagccgtttcttgtaatcttgt

SEQ ID NO: 483 - RNA, 23 nt, synthetic construct
  source 1..23: mol_type = other RNA
  modified_base 12: mod_base = OTHER; note = thymine
tctgaaagccgtttcttgtaatc

SEQ ID NO: 484 - RNA, 23 nt, synthetic construct
  source 1..23: mol_type = other RNA
tactgaaagccgtttcttgtaat

SEQ ID NO: 485 - RNA, 23 nt, synthetic construct
  source 1..23: mol_type = other RNA
  modified_base 5: mod_base = OTHER; note = thymine
tagctcaactgaaagccgtttct

SEQ ID NO: 486 - RNA, 23 nt, synthetic construct
  source 1..23: mol_type = other RNA
  modified_base 5: mod_base = OTHER; note = thymine
ttggtcagctcaactgaaagccg

SEQ ID NO: 487 - RNA, 23 nt, synthetic construct
  source 1..23: mol_type = other RNA
tgcaccaatatcaagtccaagat

SEQ ID NO: 488 - RNA, 23 nt, synthetic construct
  source 1..23: mol_type = other RNA
tctaggatcatcctggcgatatc

SEQ ID NO: 489 - RNA, 23 nt, synthetic construct
  source 1..23: mol_type = other RNA
  modified_base 5: mod_base = OTHER; note = thymine
ttagtcagcaccagggtggtggc

SEQ ID NO: 490 - RNA, 23 nt, synthetic construct
  source 1..23: mol_type = other RNA
tatcaaaccaggccagctgattg

SEQ ID NO: 491 - RNA, 23 nt, synthetic construct
  source 1..23: mol_type = other RNA
ttatcaaaccaggccagctgatt

SEQ ID NO: 492 - RNA, 23 nt, synthetic construct
  source 1..23: mol_type = other RNA
  modified_base 2: mod_base = OTHER; note = thymine
ttatcaaaccaggccagctgatt

SEQ ID NO: 493 - RNA, 23 nt, synthetic construct
  source 1..23: mol_type = other RNA
ttcagtatcaaaccaggccagct

SEQ ID NO: 494 - RNA, 23 nt, synthetic construct
  source 1..23: mol_type = other RNA
  modified_base 5: mod_base = OTHER; note = thymine
  modified_base 12: mod_base = OTHER; note = thymine
tacctaaaggatgatttacaggt

SEQ ID NO: 495 - RNA, 23 nt, synthetic construct
  source 1..23: mol_type = other RNA
  modified_base 2: mod_base = OTHER; note = thymine
ttacctaaaggatgatttacagg

SEQ ID NO: 496 - RNA, 23 nt, synthetic construct
  source 1..23: mol_type = other RNA
taccctaccaaccaagtctttct

SEQ ID NO: 497 - RNA, 23 nt, synthetic construct
  source 1..23: mol_type = other RNA
taagacatctcctttcaaagtat

SEQ ID NO: 498 - RNA, 23 nt, synthetic construct
  source 1..23: mol_type = other RNA
taacaaccagaaatctgagaaca

SEQ ID NO: 499 - RNA, 23 nt, synthetic construct
  source 1..23: mol_type = other RNA
ttaacaaccagaaatctgagaac

SEQ ID NO: 500 - RNA, 23 nt, synthetic construct
  source 1..23: mol_type = other RNA
  modified_base 2: mod_base = OTHER; note = thymine
ttaacaaccagaaatctgagaac

SEQ ID NO: 501 - RNA, 23 nt, synthetic construct
  source 1..23: mol_type = other RNA
tataacaaccagaaatctgagaa

SEQ ID NO: 502 - RNA, 23 nt, synthetic construct
  source 1..23: mol_type = other RNA
  modified_base 7: mod_base = OTHER; note = thymine
tacacatgatcacataacaacca

SEQ ID NO: 503 - RNA, 23 nt, synthetic construct
  source 1..23: mol_type = other RNA
tcacacatgatcacataacaacc

SEQ ID NO: 504 - RNA, 23 nt, synthetic construct
  source 1..23: mol_type = other RNA
  modified_base 7: mod_base = OTHER; note = thymine
ttaacttccacacatgatcacat

SEQ ID NO: 505 - RNA, 23 nt, synthetic construct
  source 1..23: mol_type = other RNA
taataacttccacacatgatcac

SEQ ID NO: 506 - RNA, 23 nt, synthetic construct
  source 1..23: mol_type = other RNA
  modified_base 2: mod_base = OTHER; note = thymine
  modified_base 5: mod_base = OTHER; note = thymine
ttaataacttccacacatgatca

SEQ ID NO: 507 - RNA, 23 nt, synthetic construct
  source 1..23: mol_type = other RNA
  modified_base 5: mod_base = OTHER; note = thymine
  modified_base 12: mod_base = OTHER; note = thymine
tcatttgagtattaagttgcaaa

SEQ ID NO: 508 - RNA, 23 nt, synthetic construct
  source 1..23: mol_type = other RNA
tgctgtataaagagagaaaggct

SEQ ID NO: 509 - RNA, 23 nt, synthetic construct
  source 1..23: mol_type = other RNA
tagacaatacagctgtataaaga

SEQ ID NO: 510 - RNA, 23 nt, synthetic construct
  source 1..23: mol_type = other RNA
  modified_base 12: mod_base = OTHER; note = thymine
tacaatgcaagttcagacaatac

SEQ ID NO: 511 - RNA, 23 nt, synthetic construct
  source 1..23: mol_type = other RNA
ttcagcaactctacaggccaatc

SEQ ID NO: 512 - RNA, 23 nt, synthetic construct
  source 1..23: mol_type = other RNA
  modified_base 5: mod_base = OTHER; note = thymine
ttggttagtgtgtcaggcacttt

SEQ ID NO: 513 - RNA, 23 nt, synthetic construct
  source 1..23: mol_type = other RNA
  modified_base 7: mod_base = OTHER; note = thymine
tcagcttggttagtgtgtcaggc

SEQ ID NO: 514 - RNA, 23 nt, synthetic construct
  source 1..23: mol_type = other RNA
  modified_base 2: mod_base = OTHER; note = thymine
ttaggaaactcagcttggttagt

SEQ ID NO: 515 - RNA, 23 nt, synthetic construct
  source 1..23: mol_type = other RNA
tttcccataggaaactcagcttg

SEQ ID NO: 516 - RNA, 23 nt, synthetic construct
  source 1..23: mol_type = other RNA
  modified_base 2: mod_base = OTHER; note = thymine
  modified_base 7: mod_base = OTHER; note = thymine
ttcaattgttcccataggaaact

SEQ ID NO: 517 - RNA, 23 nt, synthetic construct
  source 1..23: mol_type = other RNA
  modified_base 5: mod_base = OTHER; note = thymine
  modified_base 7: mod_base = OTHER; note = thymine
tttgtattgttactcctcgacca

SEQ ID NO: 518 - RNA, 23 nt, synthetic construct
  source 1..23: mol_type = other RNA
  modified_base 2: mod_base = OTHER; note = thymine
  modified_base 5: mod_base = OTHER; note = thymine
  modified_base 7: mod_base = OTHER; note = thymine
tttgtattgttactcctcgacca

SEQ ID NO: 519 - RNA, 23 nt, synthetic construct
  source 1..23: mol_type = other RNA
taagcaaggctagggtttgataa

SEQ ID NO: 520 - RNA, 23 nt, synthetic construct
  source 1..23: mol_type = other RNA
  modified_base 7: mod_base = OTHER; note = thymine
tgctacttcaaagcaagcaaagt

SEQ ID NO: 521 - RNA, 23 nt, synthetic construct
  source 1..23: mol_type = other RNA
tgagctacttcaaagcaagcaaa

SEQ ID NO: 522 - RNA, 23 nt, synthetic construct
  source 1..23: mol_type = other RNA
  modified_base 7: mod_base = OTHER; note = thymine
tagagctacttcaaagcaagcaa

SEQ ID NO: 523 - RNA, 23 nt, synthetic construct
  source 1..23: mol_type = other RNA
tcttaacactacgagagacttaa

SEQ ID NO: 524 - RNA, 23 nt, synthetic construct
  source 1..23: mol_type = other RNA
  modified_base 7: mod_base = OTHER; note = thymine
ttaacttaacactacgagagact

SEQ ID NO: 525 - RNA, 23 nt, synthetic construct
  source 1..23: mol_type = other RNA
  modified_base 7: mod_base = OTHER; note = thymine
tataacttaacactacgagagac

SEQ ID NO: 526 - RNA, 23 nt, synthetic construct
  source 1..23: mol_type = other RNA
  modified_base 5: mod_base = OTHER; note = thymine
tctataacttaacactacgagag

SEQ ID NO: 527 - RNA, 23 nt, synthetic construct
  source 1..23: mol_type = other RNA
  modified_base 5: mod_base = OTHER; note = thymine
  modified_base 7: mod_base = OTHER; note = thymine
  modified_base 12: mod_base = OTHER; note = thymine
tcactataacttaacactacgag

SEQ ID NO: 528 - RNA, 23 nt, synthetic construct
  source 1..23: mol_type = other RNA
  modified_base 7: mod_base = OTHER; note = thymine
tttcactataacttaacactacg

SEQ ID NO: 529 - RNA, 23 nt, synthetic construct
  source 1..23: mol_type = other RNA
  modified_base 7: mod_base = OTHER; note = thymine
tattgctgtagcagtattcacta

SEQ ID NO: 530 - RNA, 23 nt, synthetic construct
  source 1..23: mol_type = other RNA
tattagaaattgctgtagcagta

SEQ ID NO: 531 - RNA, 23 nt, synthetic construct
  source 1..23: mol_type = other RNA
ttctacaccattactcaattctt

SEQ ID NO: 532 - RNA, 23 nt, synthetic construct
  source 1..23: mol_type = other RNA
  modified_base 5: mod_base = OTHER; note = thymine
  modified_base 7: mod_base = OTHER; note = thymine
ttgttctacaccattactcaatt

SEQ ID NO: 533 - RNA, 23 nt, synthetic construct
  source 1..23: mol_type = other RNA
  modified_base 7: mod_base = OTHER; note = thymine
tagtgttctacaccattactcaa

SEQ ID NO: 534 - RNA, 23 nt, synthetic construct
  source 1..23: mol_type = other RNA
  modified_base 5: mod_base = OTHER; note = thymine
  modified_base 7: mod_base = OTHER; note = thymine
ttagtgttctacaccattactca

SEQ ID NO: 535 - RNA, 23 nt, synthetic construct
  source 1..23: mol_type = other RNA
  modified_base 7: mod_base = OTHER; note = thymine
tattagtgttctacaccattact

SEQ ID NO: 536 - RNA, 23 nt, synthetic construct
  source 1..23: mol_type = other RNA
  modified_base 5: mod_base = OTHER; note = thymine
  modified_base 12: mod_base = OTHER; note = thymine
tgaattagtgttctacaccatta

SEQ ID NO: 537 - RNA, 23 nt, synthetic construct
  source 1..23: mol_type = other RNA
  modified_base 2: mod_base = OTHER; note = thymine
  modified_base 7: mod_base = OTHER; note = thymine
  modified_base 12: mod_base = OTHER; note = thymine
ttgaattagtgttctacaccatt

SEQ ID NO: 538 - RNA, 23 nt, synthetic construct
  source 1..23: mol_type = other RNA
  modified_base 7: mod_base = OTHER; note = thymine
tatgaattagtgttctacaccat

SEQ ID NO: 539 - RNA, 23 nt, synthetic construct
  source 1..23: mol_type = other RNA
ttatgaattagtgttctacacca

SEQ ID NO: 540 - RNA, 23 nt, synthetic construct
  source 1..23: mol_type = other RNA
  modified_base 5: mod_base = OTHER; note = thymine
tttatgaattagtgttctacacc

SEQ ID NO: 541 - RNA, 23 nt, synthetic construct
  source 1..23: mol_type = other RNA
tattatgaattagtgttctacac

SEQ ID NO: 542 - RNA, 23 nt, synthetic construct
  source 1..23: mol_type = other RNA
  modified_base 5: mod_base = OTHER; note = thymine
  modified_base 7: mod_base = OTHER; note = thymine
  modified_base 12: mod_base = OTHER; note = thymine
tgattatgaattagtgttctaca

SEQ ID NO: 543 - RNA, 23 nt, synthetic construct
  source 1..23: mol_type = other RNA
  modified_base 2: mod_base = OTHER; note = thymine
  modified_base 5: mod_base = OTHER; note = thymine
  modified_base 12: mod_base = OTHER; note = thymine
ttgattatgaattagtgttctac

SEQ ID NO: 544 - RNA, 23 nt, synthetic construct
  source 1..23: mol_type = other RNA
  modified_base 5: mod_base = OTHER; note = thymine
ttgattatgaattagtgttctac

SEQ ID NO: 545 - RNA, 23 nt, synthetic construct
  source 1..23: mol_type = other RNA
  modified_base 7: mod_base = OTHER; note = thymine
tgtgattatgaattagtgttcta

SEQ ID NO: 546 - RNA, 23 nt, synthetic construct
  source 1..23: mol_type = other RNA
  modified_base 7: mod_base = OTHER; note = thymine
tagtgattatgaattagtgttct

SEQ ID NO: 547 - RNA, 23 nt, synthetic construct
  source 1..23: mol_type = other RNA
taaggaaactaattggaccattt

SEQ ID NO: 548 - RNA, 23 nt, synthetic construct
  source 1..23: mol_type = other RNA
tctacccatacatatcccaaata

SEQ ID NO: 549 - RNA, 23 nt, synthetic construct
  source 1..23: mol_type = other RNA
  modified_base 5: mod_base = OTHER; note = thymine
  modified_base 7: mod_base = OTHER; note = thymine
ttgatttaccctacccatacata

SEQ ID NO: 550 - RNA, 23 nt, synthetic construct
  source 1..23: mol_type = other RNA
  modified_base 5: mod_base = OTHER; note = thymine
ttactgatttaccctacccatac

SEQ ID NO: 551 - RNA, 23 nt, synthetic construct
  source 1..23: mol_type = other RNA
  modified_base 5: mod_base = OTHER; note = thymine
  modified_base 12: mod_base = OTHER; note = thymine
tctcttactgatttaccctaccc

SEQ ID NO: 552 - RNA, 23 nt, synthetic construct
  source 1..23: mol_type = other RNA
  modified_base 5: mod_base = OTHER; note = thymine
  modified_base 7: mod_base = OTHER; note = thymine
tacctcttactgatttaccctac

SEQ ID NO: 553 - RNA, 23 nt, synthetic construct
  source 1..23: mol_type = other RNA
  modified_base 12: mod_base = OTHER; note = thymine
tcacctcttactgatttacccta

SEQ ID NO: 554 - RNA, 23 nt, synthetic construct
  source 1..23: mol_type = other RNA
taacacctcttactgatttaccc

SEQ ID NO: 555 - RNA, 23 nt, synthetic construct
  source 1..23: mol_type = other RNA
tataacacctcttactgatttac

SEQ ID NO: 556 - RNA, 23 nt, synthetic construct
  source 1..23: mol_type = other RNA
taataacacctcttactgattta

SEQ ID NO: 557 - RNA, 23 nt, synthetic construct
  source 1..23: mol_type = other RNA
  modified_base 7: mod_base = OTHER; note = thymine
tccaaataacacctcttactgat

SEQ ID NO: 558 - RNA, 23 nt, synthetic construct
  source 1..23: mol_type = other RNA
  modified_base 5: mod_base = OTHER; note = thymine
tggttccatggccatgtccaact

SEQ ID NO: 559 - RNA, 23 nt, synthetic construct
  source 1..23: mol_type = other RNA
tagaatggattccagagtccagg

SEQ ID NO: 560 - RNA, 23 nt, synthetic construct
  source 1..23: mol_type = other RNA
tattgcctttaccactcagagaa

SEQ ID NO: 561 - RNA, 23 nt, synthetic construct
  source 1..23: mol_type = other RNA
ttatcagctacttgttcttgagt

SEQ ID NO: 562 - RNA, 23 nt, synthetic construct
  source 1..23: mol_type = other RNA
  modified_base 5: mod_base = OTHER; note = thymine
tctgtccatcaatatcagctact

SEQ ID NO: 563 - RNA, 23 nt, synthetic construct
  source 1..23: mol_type = other RNA
tactgtccatcaatatcagctac

SEQ ID NO: 564 - RNA, 23 nt, synthetic construct
  source 1..23: mol_type = other RNA
tatactgtccatcaatatcagct

SEQ ID NO: 565 - RNA, 23 nt, synthetic construct
  source 1..23: mol_type = other RNA
  modified_base 5: mod_base = OTHER; note = thymine
ttcattgcatactgtccatcaat

SEQ ID NO: 566 - RNA, 23 nt, synthetic construct
  source 1..23: mol_type = other RNA
tcagctcgtaccctctgagctcg

SEQ ID NO: 567 - RNA, 23 nt, synthetic construct
  source 1..23: mol_type = other RNA
tagcagctcgtaccctctgagct

SEQ ID NO: 568 - RNA, 23 nt, synthetic construct
  source 1..23: mol_type = other RNA
tcatagcagctcgtaccctctga

SEQ ID NO: 569 - RNA, 23 nt, synthetic construct
  source 1..23: mol_type = other RNA
taatgtctcagggaacatagcag

SEQ ID NO: 570 - RNA, 23 nt, synthetic construct
  source 1..23: mol_type = other RNA
  modified_base 5: mod_base = OTHER; note = thymine
ttgatggttcagccaaacgctgg

SEQ ID NO: 571 - RNA, 23 nt, synthetic construct
  source 1..23: mol_type = other RNA
ttacaactgcatgtttcagcatc

SEQ ID NO: 572 - RNA, 23 nt, synthetic construct
  source 1..23: mol_type = other RNA
tatcaagtttacaactgcatgtt

SEQ ID NO: 573 - RNA, 23 nt, synthetic construct
  source 1..23: mol_type = other RNA
tttaatcaagtttacaactgcat

SEQ ID NO: 574 - RNA, 23 nt, synthetic construct
  source 1..23: mol_type = other RNA
tatcatcttgatagttaatcaag

SEQ ID NO: 575 - RNA, 23 nt, synthetic construct
  source 1..23: mol_type = other RNA
ttgcacgtgtggcaagttctgca

SEQ ID NO: 576 - RNA, 23 nt, synthetic construct
  source 1..23: mol_type = other RNA
tgttcagggattgcacgtgtggc

SEQ ID NO: 577 - RNA, 23 nt, synthetic construct
  source 1..23: mol_type = other RNA
ttgtcagttcagggattgcacgt

SEQ ID NO: 578 - RNA, 23 nt, synthetic construct
  source 1..23: mol_type = other RNA
tttaaccaccacctggtcctcgt

SEQ ID NO: 579 - RNA, 23 nt, synthetic construct
  source 1..23: mol_type = other RNA
tgcagccttattaaccaccacct

SEQ ID NO: 580 - RNA, 23 nt, synthetic construct
  source 1..23: mol_type = other RNA
ttacatcatttgtattctgcatg

SEQ ID NO: 581 - RNA, 23 nt, synthetic construct
  source 1..23: mol_type = other RNA
  modified_base 5: mod_base = OTHER; note = thymine
tttctacatcatttgtattctgc

SEQ ID NO: 582 - RNA, 23 nt, synthetic construct
  source 1..23: mol_type = other RNA
taacgagctgtttctacatcatt

SEQ ID NO: 583 - RNA, 23 nt, synthetic construct
  source 1..23: mol_type = other RNA
tgatgggaaaggttatgcaaggt

SEQ ID NO: 584 - RNA, 23 nt, synthetic construct
  source 1..23: mol_type = other RNA
  modified_base 5: mod_base = OTHER; note = thymine
ttgatgggaaaggttatgcaagg

SEQ ID NO: 585 - RNA, 23 nt, synthetic construct
  source 1..23: mol_type = other RNA
  modified_base 5: mod_base = OTHER; note = thymine
tgcctccagacttaaagatggcc

SEQ ID NO: 586 - RNA, 23 nt, synthetic construct
  source 1..23: mol_type = other RNA
  modified_base 5: mod_base = OTHER; note = thymine
tttgtggagagttgtaatggcat

SEQ ID NO: 587 - RNA, 23 nt, synthetic construct
  source 1..23: mol_type = other RNA
  modified_base 5: mod_base = OTHER; note = thymine
tgttttgttgagcaaggcaacca

SEQ ID NO: 588 - RNA, 23 nt, synthetic construct
  source 1..23: mol_type = other RNA
ttataggtcctcattatatttac

SEQ ID NO: 589 - RNA, 23 nt, synthetic construct
  source 1..23: mol_type = other RNA
  modified_base 5: mod_base = OTHER; note = thymine
tgtataggtcctcattatattta

SEQ ID NO: 590 - RNA, 23 nt, synthetic construct
  source 1..23: mol_type = other RNA
ttagcaccttcagcactctgctt

SEQ ID NO: 591 - RNA, 23 nt, synthetic construct
  source 1..23: mol_type = other RNA
ttatatcatctgaacccagaagc

SEQ ID NO: 592 - RNA, 23 nt, synthetic construct
  source 1..23: mol_type = other RNA
tgtgaccacatttatatcatctg

SEQ ID NO: 593 - RNA, 23 nt, synthetic construct
  source 1..23: mol_type = other RNA
tgtgaggttagaaagaattccag

SEQ ID NO: 594 - RNA, 23 nt, synthetic construct
  source 1..23: mol_type = other RNA
ttgcaagtgaggttagaaagaat

SEQ ID NO: 595 - RNA, 23 nt, synthetic construct
  source 1..23: mol_type = other RNA
  modified_base 5: mod_base = OTHER; note = thymine
ttattgcaagtgaggttagaaag

SEQ ID NO: 596 - RNA, 23 nt, synthetic construct
  source 1..23: mol_type = other RNA
  modified_base 5: mod_base = OTHER; note = thymine
tttattgcaagtgaggttagaaa

SEQ ID NO: 597 - RNA, 23 nt, synthetic construct
  source 1..23: mol_type = other RNA
tagcctctataccacccacttgg

SEQ ID NO: 598 - RNA, 23 nt, synthetic construct
  source 1..23: mol_type = other RNA
taagagcctctataccacccact

SEQ ID NO: 599 - RNA, 23 nt, synthetic construct
  source 1..23: mol_type = other RNA
taagagcacagatggcaggctca

SEQ ID NO: 600 - RNA, 23 nt, synthetic construct
  source 1..23: mol_type = other RNA
tgaagagcacagatggcaggctc

SEQ ID NO: 601 - RNA, 23 nt, synthetic construct
  source 1..23: mol_type = other RNA
tgatgacgaagagcacagatggc

SEQ ID NO: 602 - RNA, 23 nt, synthetic construct
  source 1..23: mol_type = other RNA
tctggtcagatgacgaagagcac

SEQ ID NO: 603 - RNA, 23 nt, synthetic construct
  source 1..23: mol_type = other RNA
tatagtgaaggcgaactgcattc

SEQ ID NO: 604 - RNA, 23 nt, synthetic construct
  source 1..23: mol_type = other RNA
ttgggtgtaagagcttaaccaca

SEQ ID NO: 605 - RNA, 23 nt, synthetic construct
  source 1..23: mol_type = other RNA
  modified_base 5: mod_base = OTHER; note = thymine
tgatttcgaatcaatccaacagt

SEQ ID NO: 606 - RNA, 23 nt, synthetic construct
  source 1..23: mol_type = other RNA
tggaatggcaccctgctcacgca

SEQ ID NO: 607 - RNA, 23 nt, synthetic construct
  source 1..23: mol_type = other RNA
ttgcacgaacaagcaactgaact

SEQ ID NO: 608 - RNA, 23 nt, synthetic construct
  source 1..23: mol_type = other RNA
tgtgcacgaacaagcaactgaac

SEQ ID NO: 609 - RNA, 23 nt, synthetic construct
  source 1..23: mol_type = other RNA
  modified_base 5: mod_base = OTHER; note = thymine
tatgtgcacgaacaagcaactga

SEQ ID NO: 610 - RNA, 23 nt, synthetic construct
  source 1..23: mol_type = other RNA
  modified_base 5: mod_base = OTHER; note = thymine
tgaatggtatttagtcctctgat

SEQ ID NO: 611 - RNA, 23 nt, synthetic construct
  source 1..23: mol_type = other RNA
  modified_base 5: mod_base = OTHER; note = thymine
tcaatggaatggtatttagtcct

SEQ ID NO: 612 - RNA, 23 nt, synthetic construct
  source 1..23: mol_type = other RNA
  modified_base 5: mod_base = OTHER; note = thymine
tagctgcacaaacaatggaatgg

SEQ ID NO: 613 - RNA, 23 nt, synthetic construct
  source 1..23: mol_type = other RNA
tcagctgcacaaacaatggaatg

SEQ ID NO: 614 - RNA, 23 nt, synthetic construct
  source 1..23: mol_type = other RNA
tagcagctgcacaaacaatggaa

SEQ ID NO: 615 - RNA, 23 nt, synthetic construct
  source 1..23: mol_type = other RNA
ttctgtcagaggagctgtggctc

SEQ ID NO: 616 - RNA, 23 nt, synthetic construct
  source 1..23: mol_type = other RNA
  modified_base 5: mod_base = OTHER; note = thymine
tttcttgtaatcttgtggcttgt

SEQ ID NO: 617 - RNA, 23 nt, synthetic construct
  source 1..23: mol_type = other RNA
  modified_base 5: mod_base = OTHER; note = thymine
tcgtttcttgtaatcttgtggct

SEQ ID NO: 618 - RNA, 23 nt, synthetic construct
  source 1..23: mol_type = other RNA
taagccgtttcttgtaatcttgt

SEQ ID NO: 619 - RNA, 23 nt, synthetic construct
  source 1..23: mol_type = other RNA
ttgaaagccgtttcttgtaatct

SEQ ID NO: 620 - RNA, 23 nt, synthetic construct
  source 1..23: mol_type = other RNA
tggtcagctcaactgaaagccgt

SEQ ID NO: 621 - RNA, 23 nt, synthetic construct
  source 1..23: mol_type = other RNA
tagagagagctggtcagctcaac

SEQ ID NO: 622 - RNA, 23 nt, synthetic construct
  source 1..23: mol_type = other RNA
  modified_base 5: mod_base = OTHER; note = thymine
ttcattccaagccattggctctg

SEQ ID NO: 623 - RNA, 23 nt, synthetic construct
  source 1..23: mol_type = other RNA
taatatcaagtccaagatcagca

SEQ ID NO: 624 - RNA, 23 nt, synthetic construct
  source 1..23: mol_type = other RNA
ttacaggtcagtatcaaaccagg

SEQ ID NO: 625 - RNA, 23 nt, synthetic construct
  source 1..23: mol_type = other RNA
  modified_base 5: mod_base = OTHER; note = thymine
tatttacaggtcagtatcaaacc

SEQ ID NO: 626 - RNA, 23 nt, synthetic construct
  source 1..23: mol_type = other RNA
ttggcagatttacaaatagccta

SEQ ID NO: 627 - RNA, 23 nt, synthetic construct
  source 1..23: mol_type = other RNA
tgatcacataacaaccagaaatc

SEQ ID NO: 628 - RNA, 23 nt, synthetic construct
  source 1..23: mol_type = other RNA
  modified_base 5: mod_base = OTHER; note = thymine
ttgttactcatttgagtattaag

SEQ ID NO: 629 - RNA, 23 nt, synthetic construct
  source 1..23: mol_type = other RNA
tacaatgcaagttcagacaatac

SEQ ID NO: 630 - RNA, 23 nt, synthetic construct
  source 1..23: mol_type = other RNA
tagtgtgtcaggcactttctgag

SEQ ID NO: 631 - RNA, 23 nt, synthetic construct
  source 1..23: mol_type = other RNA
tttagtgtgtcaggcactttctg

SEQ ID NO: 632 - RNA, 23 nt, synthetic construct
  source 1..23: mol_type = other RNA
  modified_base 5: mod_base = OTHER; note = thymine
tgcttggttagtgtgtcaggcac

SEQ ID NO: 633 - RNA, 23 nt, synthetic construct
  source 1..23: mol_type = other RNA
  modified_base 5: mod_base = OTHER; note = thymine
tgtttacttcaattgttcccata

SEQ ID NO: 634 - RNA, 23 nt, synthetic construct
  source 1..23: mol_type = other RNA
  modified_base 5: mod_base = OTHER; note = thymine
taattccatcttgtgatccattc

SEQ ID NO: 635 - RNA, 23 nt, synthetic construct
  source 1..23: mol_type = other RNA
tcaaggctagggtttgataaatt

SEQ ID NO: 636 - RNA, 23 nt, synthetic construct
  source 1..23: mol_type = other RNA
tagtcagtaccattacagatatt

SEQ ID NO: 637 - RNA, 23 nt, synthetic construct
  source 1..23: mol_type = other RNA
  modified_base 5: mod_base = OTHER; note = thymine
tagctacttcaaagcaagcaaag

SEQ ID NO: 638 - RNA, 23 nt, synthetic construct
  source 1..23: mol_type = other RNA
tattcactataacttaacactac

SEQ ID NO: 639 - RNA, 23 nt, synthetic construct
  source 1..23: mol_type = other RNA
  modified_base 5: mod_base = OTHER; note = thymine
tgtattcactataacttaacact

SEQ ID NO: 640 - RNA, 23 nt, synthetic construct
  source 1..23: mol_type = other RNA
tttagtgttctacaccattactc

SEQ ID NO: 641 - RNA, 23 nt, synthetic construct
  source 1..23: mol_type = other RNA
  modified_base 5: mod_base = OTHER; note = thymine
taattagtgttctacaccattac

SEQ ID NO: 642 - RNA, 23 nt, synthetic construct
  source 1..23: mol_type = other RNA
tttagagtgattatgaattagtg

SEQ ID NO: 643 - RNA, 23 nt, synthetic construct
  source 1..23: mol_type = other RNA
tcacctcttactgatttacccta

SEQ ID NO: 644 - RNA, 23 nt, synthetic construct
  source 1..23: mol_type = other RNA
ttaacacctcttactgatttacc

SEQ ID NO: 645 - RNA, 21 nt, synthetic construct
  source 1..21: mol_type = other RNA
  modified_base 1: mod_base = OTHER; note = 2'-O-methylguanosine-3'-phosphorothioate
  modified_base 2: mod_base = OTHER; note = 2'-O-methyladenosine-3'-phosphorothioate
  modified_base 3: mod_base = OTHER; note = 2'-O-methylguanosine-3'-phosphate
  modified_base 4: mod_base = OTHER; note = 2'-O-methylguanosine-3'-phosphate
  modified_base 5: mod_base = OTHER; note = 2'-O-methylguanosine-3'-phosphate
  modified_base 6: mod_base = OTHER; note = 2'-O-methyluridine-3'-phosphate
  modified_base 7: mod_base = OTHER; note = 2'-fluoroadenosine-3'-phosphate
  modified_base 8: mod_base = OTHER; note = 2'-O-methyluridine-3'-phosphate
  modified_base 9: mod_base = OTHER; note = 2'-fluorouridine-3'-phosphate
  modified_base 10: mod_base = OTHER; note = 2'-fluorouridine-3'-phosphate
  modified_base 11: mod_base = OTHER; note = 2'-fluoroguanosine-3'-phosphate
  modified_base 12: mod_base = OTHER; note = 2'-O-methyladenosine-3'-phosphate
  modified_base 13: mod_base = OTHER; note = 2'-O-methyladenosine-3'-phosphate
  modified_base 14: mod_base = OTHER; note = 2'-O-methylguanosine-3'-phosphate
  modified_base 15: mod_base = OTHER; note = 2'-O-methyluridine-3'-phosphate
  modified_base 16: mod_base = OTHER; note = 2'-O-methyladenosine-3'-phosphate
  modified_base 17: mod_base = OTHER; note = 2'-O-methyluridine-3'-phosphate
  modified_base 18: mod_base = OTHER; note = 2'-O-methyladenosine-3'-phosphate
  modified_base 19: mod_base = OTHER; note = 2'-O-methylcytidine-3'-phosphorothioate
  modified_base 20: mod_base = OTHER; note = 2'-O-methylcytidine-3'-phosphorothioate
  modified_base 21: mod_base = OTHER; note = 2'-O-methyladenosine-3'-phosphate
gagggtatttgaagtatacca

SEQ ID NO: 646 - RNA, 21 nt, synthetic construct
  source 1..21: mol_type = other RNA
  modified_base 1: mod_base = OTHER; note = 2'-O-methylguanosine-3'-phosphorothioate
  modified_base 2: mod_base = OTHER; note = 2'-O-methyladenosine-3'-phosphorothioate
  modified_base 3: mod_base = OTHER; note = 2'-O-methylguanosine-3'-phosphate
  modified_base 4: mod_base = OTHER; note = 2'-O-methylguanosine-3'-phosphate
  modified_base 5: mod_base = OTHER; note = 2'-O-methylguanosine-3'-phosphate
  modified_base 6: mod_base = OTHER; note = 2'-O-methyluridine-3'-phosphate
  modified_base 7: mod_base = OTHER; note = 2'-O-methyladenosine-3'-phosphate
  modified_base 8: mod_base = OTHER; note = 2'-O-methyluridine-3'-phosphate
  modified_base 9: mod_base = OTHER; note = 2'-fluorouridine-3'-phosphate
  modified_base 10: mod_base = OTHER; note = 2'-fluorouridine-3'-phosphate
  modified_base 11: mod_base = OTHER; note = 2'-fluoroguanosine-3'-phosphate
  modified_base 12: mod_base = OTHER; note = 2'-O-methyladenosine-3'-phosphate
  modified_base 13: mod_base = OTHER; note = 2'-O-methyladenosine-3'-phosphate
  modified_base 14: mod_base = OTHER; note = 2'-O-methylguanosine-3'-phosphate
  modified_base 15: mod_base = OTHER; note = 2'-O-methyluridine-3'-phosphate
  modified_base 16: mod_base = OTHER; note = 2'-O-methyladenosine-3'-phosphate
  modified_base 17: mod_base = OTHER; note = 2'-O-methyluridine-3'-phosphate
  modified_base 18: mod_base = OTHER; note = 2'-O-methyladenosine-3'-phosphate
  modified_base 19: mod_base = OTHER; note = 2'-O-methylcytidine-3'-phosphorothioate
  modified_base 20: mod_base = OTHER; note = 2'-O-methylcytidine-3'-phosphorothioate
  modified_base 21: mod_base = OTHER; note = 2'-O-methyladenosine-3'-phosphate
gagggtatttgaagtatacca

SEQ ID NO: 647 - RNA, 21 nt, synthetic construct
  source 1..21: mol_type = other RNA
  modified_base 1: mod_base = OTHER; note = 2'-O-methylguanosine-3'-phosphorothioate
  modified_base 2: mod_base = OTHER; note = 2'-O-methylguanosine-3'-phosphorothioate
  modified_base 3: mod_base = OTHER; note = 2'-O-methylguanosine-3'-phosphate
  modified_base 4: mod_base = OTHER; note = 2'-O-methyluridine-3'-phosphate
  modified_base 5: mod_base = OTHER; note = 2'-O-methyladenosine-3'-phosphate
  modified_base 6: mod_base = OTHER; note = 2'-O-methyluridine-3'-phosphate
  modified_base 7: mod_base = OTHER; note = 2'-fluorouridine-3'-phosphate
  modified_base 8: mod_base = OTHER; note = 2'-O-methyluridine-3'-phosphate
  modified_base 9: mod_base = OTHER; note = 2'-fluoroguanosine-3'-phosphate
  modified_base 10: mod_base = OTHER; note = 2'-fluoroadenosine-3'-phosphate
  modified_base 11: mod_base = OTHER; note = 2'-fluoroadenosine-3'-phosphate
  modified_base 12: mod_base = OTHER; note = 2'-O-methylguanosine-3'-phosphate
  modified_base 13: mod_base = OTHER; note = 2'-O-methyluridine-3'-phosphate
  modified_base 14: mod_base = OTHER; note = 2'-O-methyladenosine-3'-phosphate
  modified_base 15: mod_base = OTHER; note = 2'-O-methyluridine-3'-phosphate
  modified_base 16: mod_base = OTHER; note = 2'-O-methyladenosine-3'-phosphate
  modified_base 17: mod_base = OTHER; note = 2'-O-methylcytidine-3'-phosphate
  modified_base 18: mod_base = OTHER; note = 2'-O-methylcytidine-3'-phosphate
  modified_base 19: mod_base = OTHER; note = 2'-O-methyladenosine-3'-phosphorothioate
  modified_base 20: mod_base = OTHER; note = 2'-O-methyluridine-3'-phosphorothioate
  modified_base 21: mod_base = OTHER; note = 2'-O-methyladenosine-3'-phosphate
gggtatttgaagtataccata

SEQ ID NO: 648 - RNA, 21 nt, synthetic construct
  source 1..21: mol_type = other RNA
  modified_base 1: mod_base = OTHER; note = 2'-O-methylguanosine-3'-phosphorothioate
  modified_base 2: mod_base = OTHER; note = 2'-O-methylguanosine-3'-phosphorothioate
  modified_base 3: mod_base = OTHER; note = 2'-O-methyluridine-3'-phosphate
  modified_base 4: mod_base = OTHER; note = 2'-O-methyladenosine-3'-phosphate
  modified_base 5: mod_base = OTHER; note = 2'-O-methyluridine-3'-phosphate
  modified_base 6: mod_base = OTHER; note = 2'-O-methyluridine-3'-phosphate
  modified_base 7: mod_base = OTHER; note = 2'-fluorouridine-3'-phosphate
  modified_base 8: mod_base = OTHER; note = 2'-O-methylguanosine-3'-phosphate
  modified_base 9: mod_base = OTHER; note = 2'-fluoroadenosine-3'-phosphate
  modified_base 10: mod_base = OTHER; note = 2'-fluoroadenosine-3'-phosphate
  modified_base 11: mod_base = OTHER; note = 2'-fluoroguanosine-3'-phosphate
  modified_base 12: mod_base = OTHER; note = 2'-O-methyluridine-3'-phosphate
  modified_base 13: mod_base = OTHER; note = 2'-O-methyladenosine-3'-phosphate
  modified_base 14: mod_base = OTHER; note = 2'-O-methyluridine-3'-phosphate
  modified_base 15: mod_base = OTHER; note = 2'-O-methyladenosine-3'-phosphate
  modified_base 16: mod_base = OTHER; note = 2'-O-methylcytidine-3'-phosphate
  modified_base 17: mod_base = OTHER; note = 2'-O-methylcytidine-3'-phosphate
  modified_base 18: mod_base = OTHER; note = 2'-O-methyladenosine-3'-phosphate
  modified_base 19: mod_base = OTHER; note = 2'-O-methyluridine-3'-phosphorothioate
  modified_base 20: mod_base = OTHER; note = 2'-O-methyladenosine-3'-phosphorothioate
  modified_base 21: mod_base = OTHER; note = 2'-O-methyladenosine-3'-phosphate
ggtatttgaagtataccataa

SEQ ID NO: 649 - RNA, 21 nt, synthetic construct
  source 1..21: mol_type = other RNA
  modified_base 1: mod_base = OTHER; note = 2'-O-methyluridine-3'-phosphorothioate
  modified_base 2: mod_base = OTHER; note = 2'-O-methyluridine-3'-phosphorothioate
  modified_base 3: mod_base = OTHER; note = 2'-O-methyluridine-3'-phosphate
  modified_base 4: mod_base = OTHER; note = 2'-O-methylguanosine-3'-phosphate
  modified_base 5: mod_base = OTHER; note = 2'-O-methyladenosine-3'-phosphate
  modified_base 6: mod_base = OTHER; note = 2'-O-methyladenosine-3'-phosphate
  modified_base 7: mod_base = OTHER; note = 2'-fluoroguanosine-3'-phosphate
  modified_base 8: mod_base = OTHER; note = 2'-O-methyluridine-3'-phosphate
  modified_base 9: mod_base = OTHER; note = 2'-fluoroadenosine-3'-phosphate
  modified_base 10: mod_base = OTHER; note = 2'-fluorouridine-3'-phosphate
  modified_base 11: mod_base = OTHER; note = 2'-fluoroadenosine-3'-phosphate
  modified_base 12: mod_base = OTHER; note = 2'-O-methylcytidine-3'-phosphate
  modified_base 13: mod_base = OTHER; note = 2'-O-methylcytidine-3'-phosphate
  modified_base 14: mod_base = OTHER; note = 2'-O-methyladenosine-3'-phosphate
  modified_base 15: mod_base = OTHER; note = 2'-O-methyluridine-3'-phosphate
  modified_base 16: mod_base = OTHER; note = 2'-O-methyladenosine-3'-phosphate
  modified_base 17: mod_base = OTHER; note = 2'-O-methylcytidine-3'-phosphate
  modified_base 18: mod_base = OTHER; note = 2'-O-methyladenosine-3'-phosphate
  modified_base 19: mod_base = OTHER; note = 2'-O-methyladenosine-3'-phosphorothioate
  modified_base 20: mod_base = OTHER; note = 2'-O-methylcytidine-3'-phosphorothioate
  modified_base 21: mod_base = OTHER; note = 2'-O-methyladenosine-3'-phosphate
tttgaagtataccatacaaca

SEQ ID NO: 650 - RNA, 21 nt, synthetic construct
  source 1..21: mol_type = other RNA
  modified_base 1: mod_base = OTHER; note = 2'-O-methyluridine-3'-phosphorothioate
  modified_base 2: mod_base = OTHER; note = 2'-O-methyluridine-3'-phosphorothioate
  modified_base 3: mod_base = OTHER; note = 2'-O-methylguanosine-3'-phosphate
  modified_base 4: mod_base = OTHER; note = 2'-O-methyladenosine-3'-phosphate
  modified_base 5: mod_base = OTHER; note = 2'-O-methyladenosine-3'-phosphate
  modified_base 6: mod_base = OTHER; note = 2'-O-methylguanosine-3'-phosphate
  modified_base 7: mod_base = OTHER; note = 2'-fluorouridine-3'-phosphate
  modified_base 8: mod_base = OTHER; note = 2'-O-methyladenosine-3'-phosphate
  modified_base 9: mod_base = OTHER; note = 2'-fluorouridine-3'-phosphate
  modified_base 10: mod_base = OTHER; note = 2'-fluoroadenosine-3'-phosphate
  modified_base 11: mod_base = OTHER; note = 2'-fluorocytidine-3'-phosphate
  modified_base 12: mod_base = OTHER; note = 2'-O-methylcytidine-3'-phosphate
  modified_base 13: mod_base = OTHER; note = 2'-O-methyladenosine-3'-phosphate
  modified_base 14: mod_base = OTHER; note = 2'-O-methyluridine-3'-phosphate
  modified_base 15: mod_base = OTHER; note = 2'-O-methyladenosine-3'-phosphate
  modified_base 16: mod_base = OTHER; note = 2'-O-methylcytidine-3'-phosphate
  modified_base 17: mod_base = OTHER; note = 2'-O-methyladenosine-3'-phosphate
  modified_base 18: mod_base = OTHER; note = 2'-O-methyladenosine-3'-phosphate
  modified_base 19: mod_base = OTHER; note = 2'-O-methylcytidine-3'-phosphorothioate
  modified_base 20: mod_base = OTHER; note = 2'-O-methyluridine-3'-phosphorothioate
  modified_base 21: mod_base = OTHER; note = 2'-O-methyladenosine-3'-phosphate
ttgaagtataccatacaacta

SEQ ID NO: 651 - RNA, 21 nt, synthetic construct
  source 1..21: mol_type = other RNA
  modified_base 1: mod_base = OTHER; note = 2'-O-methyluridine-3'-phosphorothioate
  modified_base 2: mod_base = OTHER; note = 2'-O-methylguanosine-3'-phosphorothioate
  modified_base 3: mod_base = OTHER; note = 2'-O-methylguanosine-3'-phosphate
  modified_base 4: mod_base = OTHER; note = 2'-O-methyladenosine-3'-phosphate
  modified_base 5: mod_base = OTHER; note = 2'-O-methylcytidine-3'-phosphate
  modified_base 6: mod_base = OTHER; note = 2'-O-methyladenosine-3'-phosphate
  modified_base 7: mod_base = OTHER; note = 2'-fluoroadenosine-3'-phosphate
  modified_base 8: mod_base = OTHER; note = 2'-O-methyluridine-3'-phosphate
  modified_base 9: mod_base = OTHER; note = 2'-fluoroguanosine-3'-phosphate
  modified_base 10: mod_base = OTHER; note = 2'-fluoroguanosine-3'-phosphate
  modified_base 11: mod_base = OTHER; note = 2'-fluorocytidine-3'-phosphate
  modified_base 12: mod_base = OTHER; note = 2'-O-methyluridine-3'-phosphate
  modified_base 13: mod_base = OTHER; note = 2'-O-methyladenosine-3'-phosphate
  modified_base 14: mod_base = OTHER; note = 2'-O-methylcytidine-3'-phosphate
  modified_base 15: mod_base = OTHER; note = 2'-O-methyluridine-3'-phosphate
  modified_base 16: mod_base = OTHER; note = 2'-O-methylcytidine-3'-phosphate
  modified_base 17: mod_base = OTHER; note = 2'-O-methyladenosine-3'-phosphate
  modified_base 18: mod_base = OTHER; note = 2'-O-methyladenosine-3'-phosphate
  modified_base 19: mod_base = OTHER; note = 2'-O-methylguanosine-3'-phosphorothioate
  modified_base 20: mod_base = OTHER; note = 2'-O-methylcytidine-3'-phosphorothioate
  modified_base 21: mod_base = OTHER; note = 2'-O-methyladenosine-3'-phosphate
tggacaatggctactcaagca

SEQ ID NO: 652 - RNA, 21 nt, synthetic construct
  source 1..21: mol_type = other RNA
  modified_base 1: mod_base = OTHER; note = 2'-O-methylguanosine-3'-phosphorothioate
  modified_base 2: mod_base = OTHER; note = 2'-O-methyladenosine-3'-phosphorothioate
  modified_base 3: mod_base = OTHER; note = 2'-O-methylcytidine-3'-phosphate
  modified_base 4: mod_base = OTHER; note = 2'-O-methyladenosine-3'-phosphate
  modified_base 5: mod_base = OTHER; note = 2'-O-methyladenosine-3'-phosphate
  modified_base 6: mod_base = OTHER; note = 2'-O-methyluridine-3'-phosphate
  modified_base 7: mod_base = OTHER; note = 2'-O-methylguanosine-3'-phosphate
  modified_base 8: mod_base = OTHER; note = 2'-O-methylguanosine-3'-phosphate
  modified_base 9: mod_base = OTHER; note = 2'-fluorocytidine-3'-phosphate
  modified_base 10: mod_base = OTHER; note = 2'-fluorouridine-3'-phosphate
  modified_base 11: mod_base = OTHER; note = 2'-fluoroadenosine-3'-phosphate
  modified_base 12: mod_base = OTHER; note = 2'-O-methylcytidine-3'-phosphate
  modified_base 13: mod_base = OTHER; note = 2'-O-methyluridine-3'-phosphate
  modified_base 14: mod_base = OTHER; note = 2'-O-methylcytidine-3'-phosphate
  modified_base 15: mod_base = OTHER; note = 2'-O-methyladenosine-3'-phosphate
  modified_base 16: mod_base = OTHER; note = 2'-O-methyladenosine-3'-phosphate
  modified_base 17: mod_base = OTHER; note = 2'-O-methylguanosine-3'-phosphate
  modified_base 18: mod_base = OTHER; note = 2'-O-methylcytidine-3'-phosphate
  modified_base 19: mod_base = OTHER; note = 2'-O-methyluridine-3'-phosphorothioate
  modified_base 20: mod_base = OTHER; note = 2'-O-methylguanosine-3'-phosphorothioate
  modified_base 21: mod_base = OTHER; note = 2'-O-methyladenosine-3'-phosphate
gacaatggctactcaagctga

SEQ ID NO: 653 - RNA, 21 nt, synthetic construct
  source 1..21: mol_type = other RNA
  modified_base 1: mod_base = OTHER; note = 2'-O-methyladenosine-3'-phosphorothioate
  modified_base 2: mod_base = OTHER; note = 2'-O-methylcytidine-3'-phosphorothioate
  modified_base 3: mod_base = OTHER; note = 2'-O-methyladenosine-3'-phosphate
  modified_base 4: mod_base = OTHER; note = 2'-O-methyladenosine-3'-phosphate
  modified_base 5: mod_base = OTHER; note = 2'-O-methyluridine-3'-phosphate
  modified_base 6: mod_base = OTHER; note = 2'-O-methylguanosine-3'-phosphate
  modified_base 7: mod_base = OTHER; note = 2'-fluoroguanosine-3'-phosphate
  modified_base 8: mod_base = OTHER; note = 2'-O-methylcytidine-3'-phosphate
  modified_base 9: mod_base = OTHER; note = 2'-fluorouridine-3'-phosphate
  modified_base 10: mod_base = OTHER; note = 2'-fluoroadenosine-3'-phosphate
  modified_base 11: mod_base = OTHER; note = 2'-fluorocytidine-3'-phosphate
  modified_base 12: mod_base = OTHER; note = 2'-O-methyluridine-3'-phosphate
  modified_base 13: mod_base = OTHER; note = 2'-O-methylcytidine-3'-phosphate
  modified_base 14: mod_base = OTHER; note = 2'-O-methyladenosine-3'-phosphate
  modified_base 15: mod_base = OTHER; note = 2'-O-methyladenosine-3'-phosphate
  modified_base 16: mod_base = OTHER; note = 2'-O-methylguanosine-3'-phosphate
  modified_base 17: mod_base = OTHER; note = 2'-O-methylcytidine-3'-phosphate
  modified_base 18: mod_base = OTHER; note = 2'-O-methyluridine-3'-phosphate
  modified_base 19: mod_base = OTHER; note = 2'-O-methylguanosine-3'-phosphorothioate
  modified_base 20: mod_base = OTHER; note = 2'-O-methyladenosine-3'-phosphorothioate
  modified_base 21: mod_base = OTHER; note = 2'-O-methyladenosine-3'-phosphate
acaatggctactcaagctgaa

SEQ ID NO: 654 - RNA, 21 nt, synthetic construct
  source 1..21: mol_type = other RNA
  modified_base 1: mod_base = OTHER; note = 2'-O-methyladenosine-3'-phosphorothioate
  modified_base 2: mod_base = OTHER; note = 2'-O-methyladenosine-3'-phosphorothioate
  modified_base 3: mod_base = OTHER; note = 2'-O-methylguanosine-3'-phosphate
  modified_base 4: mod_base = OTHER; note = 2'-O-methylcytidine-3'-phosphate
  modified_base 5: mod_base = OTHER; note = 2'-O-methyluridine-3'-phosphate
  modified_base 6: mod_base = OTHER; note = 2'-O-methylguanosine-3'-phosphate
  modified_base 7: mod_base = OTHER; note = 2'-O-methyladenosine-3'-phosphate
  modified_base 8: mod_base = OTHER; note = 2'-O-methyluridine-3'-phosphate
  modified_base 9: mod_base = OTHER; note = 2'-fluorouridine-3'-phosphate
  modified_base 10: mod_base = OTHER; note = 2'-fluorouridine-3'-phosphate
  modified_base 11: mod_base = OTHER; note = 2'-fluoroguanosine-3'-phosphate
  modified_base 12: mod_base = OTHER; note = 2'-O-methyladenosine-3'-phosphate
  modified_base 13: mod_base = OTHER; note = 2'-O-methyluridine-3'-phosphate
  modified_base 14: mod_base = OTHER; note = 2'-O-methylguanosine-3'-phosphate
  modified_base 15: mod_base = OTHER; note = 2'-O-methylguanosine-3'-phosphate
  modified_base 16: mod_base = OTHER; note = 2'-O-methyladenosine-3'-phosphate
  modified_base 17: mod_base = OTHER; note = 2'-O-methylguanosine-3'-phosphate
  modified_base 18: mod_base = OTHER; note = 2'-O-methyluridine-3'-phosphate
  modified_base 19: mod_base = OTHER; note = 2'-O-methyluridine-3'-phosphorothioate
  modified_base 20: mod_base = OTHER; note = 2'-O-methylguanosine-3'-phosphorothioate
  modified_base 21: mod_base = OTHER; note = 2'-O-methyladenosine-3'-phosphate
aagctgatttgatggagttga

SEQ ID NO: 655 - RNA, 21 nt, synthetic construct
  source 1..21: mol_type = other RNA
  modified_base 1: mod_base = OTHER; note = 2'-O-methyladenosine-3'-phosphorothioate
  modified_base 2: mod_base = OTHER; note = 2'-O-methylguanosine-3'-phosphorothioate
  modified_base 3: mod_base = OTHER; note = 2'-O-methylcytidine-3'-phosphate
  modified_base 4: mod_base = OTHER; note = 2'-O-methyluridine-3'-phosphate
  modified_base 5: mod_base = OTHER; note = 2'-O-methylguanosine-3'-phosphate
  modified_base 6: mod_base = OTHER; note = 2'-O-methyladenosine-3'-phosphate
  modified_base 7: mod_base = OTHER; note = 2'-O-methyluridine-3'-phosphate
  modified_base 8: mod_base = OTHER; note = 2'-O-methyluridine-3'-phosphate
  modified_base 9: mod_base = OTHER; note = 2'-fluorouridine-3'-phosphate
  modified_base 10: mod_base = OTHER; note = 2'-fluoroguanosine-3'-phosphate
  modified_base 11: mod_base = OTHER; note = 2'-fluoroadenosine-3'-phosphate
  modified_base 12: mod_base = OTHER; note = 2'-O-methyluridine-3'-phosphate
  modified_base 13: mod_base = OTHER; note = 2'-O-methylguanosine-3'-phosphate
  modified_base 14: mod_base = OTHER; note = 2'-O-methylguanosine-3'-phosphate
  modified_base 15: mod_base = OTHER; note = 2'-O-methyladenosine-3'-phosphate
  modified_base 16: mod_base = OTHER; note = 2'-O-methylguanosine-3'-phosphate
  modified_base 17: mod_base = OTHER; note = 2'-O-methyluridine-3'-phosphate
  modified_base 18: mod_base = OTHER; note = 2'-O-methyluridine-3'-phosphate
  modified_base 19: mod_base = OTHER; note = 2'-O-methylguanosine-3'-phosphorothioate
  modified_base 20: mod_base = OTHER; note = 2'-O-methylguanosine-3'-phosphorothioate
  modified_base 21: mod_base = OTHER; note = 2'-O-methyladenosine-3'-phosphate
agctgatttgatggagttgga

SEQ ID NO: 656 - RNA, 21 nt, synthetic construct
  source 1..21: mol_type = other RNA
  modified_base 1: mod_base = OTHER; note = 2'-O-methylcytidine-3'-phosphorothioate
  modified_base 2: mod_base = OTHER; note = 2'-O-methylcytidine-3'-phosphorothioate
  modified_base 3: mod_base = OTHER; note = 2'-O-methyluridine-3'-phosphate
  modified_base 4: mod_base = OTHER; note = 2'-O-methyluridine-3'-phosphate
  modified_base 5: mod_base = OTHER; note = 2'-O-methylcytidine-3'-phosphate
  modified_base 6: mod_base = OTHER; note = 2'-O-methyluridine-3'-phosphate
  modified_base 7: mod_base = OTHER; note = 2'-O-methylcytidine-3'-phosphate
  modified_base 8: mod_base = OTHER; note = 2'-O-methyluridine-3'-phosphate
  modified_base 9: mod_base = OTHER; note = 2'-fluoroguanosine-3'-phosphate
  modified_base 10: mod_base = OTHER; note = 2'-fluoroadenosine-3'-phosphate
  modified_base 11: mod_base = OTHER; note = 2'-fluoroguanosine-3'-phosphate
  modified_base 12: mod_base = OTHER; note = 2'-O-methyluridine-3'-phosphate
  modified_base 13: mod_base = OTHER; note = 2'-O-methylguanosine-3'-phosphate
  modified_base 14: mod_base = OTHER; note = 2'-O-methylguanosine-3'-phosphate
  modified_base 15: mod_base = OTHER; note = 2'-O-methyluridine-3'-phosphate
  modified_base 16: mod_base = OTHER; note = 2'-O-methyladenosine-3'-phosphate
  modified_base 17: mod_base = OTHER; note = 2'-O-methyladenosine-3'-phosphate
  modified_base 18: mod_base = OTHER; note = 2'-O-methyladenosine-3'-phosphate
  modified_base 19: mod_base = OTHER; note = 2'-O-methylguanosine-3'-phosphorothioate
  modified_base 20: mod_base = OTHER; note = 2'-O-methylguanosine-3'-phosphorothioate
  modified_base 21: mod_base = OTHER; note = 2'-O-methyladenosine-3'-phosphate
ccttctctgagtggtaaagga

SEQ ID NO: 657 - RNA, 21 nt, synthetic construct
  source 1..21: mol_type = other RNA
  modified_base 1: mod_base = OTHER; note = 2'-O-methylcytidine-3'-phosphorothioate
  modified_base 2: mod_base = OTHER; note = 2'-O-methyladenosine-3'-phosphorothioate
  modified_base 3: mod_base = OTHER; note = 2'-O-methylguanosine-3'-phosphate
  modified_base 4: mod_base = OTHER; note = 2'-O-methyluridine-3'-phosphate
  modified_base 5: mod_base = OTHER; note = 2'-O-methylcytidine-3'-phosphate
  modified_base 6: mod_base = OTHER; note = 2'-O-methylcytidine-3'-phosphate
  modified_base 7: mod_base = OTHER; note = 2'-fluorouridine-3'-phosphate
  modified_base 8: mod_base = OTHER; note = 2'-O-methyluridine-3'-phosphate
  modified_base 9: mod_base = OTHER; note = 2'-fluorocytidine-3'-phosphate
  modified_base 10: mod_base = OTHER; note = 2'-fluoroadenosine-3'-phosphate
  modified_base 11: mod_base = OTHER; note = 2'-fluorocytidine-3'-phosphate
  modified_base 12: mod_base = OTHER; note = 2'-O-methyluridine-3'-phosphate
  modified_base 13: mod_base = OTHER; note = 2'-O-methylcytidine-3'-phosphate
  modified_base 14: mod_base = OTHER; note = 2'-O-methyladenosine-3'-phosphate
  modified_base 15: mod_base = OTHER; note = 2'-O-methyladenosine-3'-phosphate
  modified_base 16: mod_base = OTHER; note = 2'-O-methylguanosine-3'-phosphate
  modified_base 17: mod_base = OTHER; note = 2'-O-methyladenosine-3'-phosphate
  modified_base 18: mod_base = OTHER; note = 2'-O-methyladenosine-3'-phosphate
  modified_base 19: mod_base = OTHER; note = 2'-O-methylcytidine-3'-phosphorothioate
  modified_base 20: mod_base = OTHER; note = 2'-O-methyladenosine-3'-phosphorothioate
  modified_base 21: mod_base = OTHER; note = 2'-O-methyladenosine-3'-phosphate
cagtccttcactcaagaacaa

SEQ ID NO: 658 - RNA, 21 nt, synthetic construct
  source 1..21: mol_type = other RNA
  modified_base 1: mod_base = OTHER; note = 2'-O-methylcytidine-3'-phosphorothioate
  modified_base 2: mod_base = OTHER; note = 2'-O-methyluridine-3'-phosphorothioate
  modified_base 3: mod_base = OTHER; note = 2'-O-methyluridine-3'-phosphate
  modified_base 4: mod_base = OTHER; note = 2'-O-methylcytidine-3'-phosphate
  modified_base 5: mod_base = OTHER; note = 2'-O-methyladenosine-3'-phosphate
  modified_base 6: mod_base = OTHER; note = 2'-O-methylcytidine-3'-phosphate
  modified_base 7: mod_base = OTHER; note = 2'-O-methyluridine-3'-phosphate
  modified_base 8: mod_base = OTHER; note = 2'-O-methylcytidine-3'-phosphate
  modified_base 9: mod_base = OTHER; note = 2'-fluoroadenosine-3'-phosphate
  modified_base 10: mod_base = OTHER; note = 2'-fluoroadenosine-3'-phosphate
  modified_base 11: mod_base = OTHER; note = 2'-fluoroguanosine-3'-phosphate
  modified_base 12: mod_base = OTHER; note = 2'-O-methyladenosine-3'-phosphate
  modified_base 13: mod_base = OTHER; note = 2'-O-methyladenosine-3'-phosphate
  modified_base 14: mod_base = OTHER; note = 2'-O-methylcytidine-3'-phosphate
  modified_base 15: mod_base = OTHER; note = 2'-O-methyladenosine-3'-phosphate
  modified_base 16: mod_base = OTHER; note = 2'-O-methyladenosine-3'-phosphate
  modified_base 17: mod_base = OTHER; note = 2'-O-methylguanosine-3'-phosphate
  modified_base 18: mod_base = OTHER; note = 2'-O-methyluridine-3'-phosphate
  modified_base 19: mod_base = OTHER; note = 2'-O-methyladenosine-3'-phosphorothioate
  modified_base 20: mod_base = OTHER; note = 2'-O-methylguanosine-3'-phosphorothioate
  modified_base 21: mod_base = OTHER; note = 2'-O-methyladenosine-3'-phosphate
cttcactcaagaacaagtaga

SEQ ID NO: 659 - RNA, 21 nt, synthetic construct
  source 1..21: mol_type = other RNA
  modified_base 1: mod_base = OTHER; note = 2'-O-methylcytidine-3'-phosphorothioate
  modified_base 2: mod_base = OTHER; note = 2'-O-methyladenosine-3'-phosphorothioate
  modified_base 3: mod_base = OTHER; note = 2'-O-methylcytidine-3'-phosphate
  modified_base 4: mod_base = OTHER; note = 2'-O-methyluridine-3'-phosphate
  modified_base 5: mod_base = OTHER; note = 2'-O-methylcytidine-3'-phosphate
  modified_base 6: mod_base = OTHER; note = 2'-O-methyladenosine-3'-phosphate
  modified_base 7: mod_base = OTHER; note = 2'-O-methyladenosine-3'-phosphate
  modified_base 8: mod_base = OTHER; note = 2'-O-methylguanosine-3'-phosphate
  modified_base 9: mod_base = OTHER; note = 2'-fluoroadenosine-3'-phosphate
  modified_base 10: mod_base = OTHER; note = 2'-fluoroadenosine-3'-phosphate
  modified_base 11: mod_base = OTHER; note = 2'-fluorocytidine-3'-phosphate
  modified_base 12: mod_base = OTHER; note = 2'-O-methyladenosine-3'-phosphate
  modified_base 13: mod_base = OTHER; note = 2'-O-methyladenosine-3'-phosphate
  modified_base 14: mod_base = OTHER; note = 2'-O-methylguanosine-3'-phosphate
  modified_base 15: mod_base = OTHER; note = 2'-O-methyluridine-3'-phosphate
  modified_base 16: mod_base = OTHER; note = 2'-O-methyladenosine-3'-phosphate
  modified_base 17: mod_base = OTHER; note = 2'-O-methylguanosine-3'-phosphate
  modified_base 18: mod_base = OTHER; note = 2'-O-methylcytidine-3'-phosphate
  modified_base 19: mod_base = OTHER; note = 2'-O-methyluridine-3'-phosphorothioate
  modified_base 20: mod_base = OTHER; note = 2'-O-methylguanosine-3'-phosphorothioate
  modified_base 21: mod_base = OTHER; note = 2'-O-methyladenosine-3'-phosphate
cactcaagaacaagtagctga

SEQ ID NO: 660 - RNA, 21 nt, synthetic construct
  source 1..21: mol_type = other RNA
  modified_base 1: mod_base = OTHER; note = 2'-O-methylguanosine-3'-phosphorothioate
  modified_base 2: mod_base = OTHER; note = 2'-O-methyluridine-3'-phosphorothioate
  modified_base 3: mod_base = OTHER; note = 2'-O-methyladenosine-3'-phosphate
  modified_base 4: mod_base = OTHER; note = 2'-O-methylguanosine-3'-phosphate
  modified_base 5: mod_base = OTHER; note = 2'-O-methylcytidine-3'-phosphate
  modified_base 6: mod_base = OTHER; note = 2'-O-methyluridine-3'-phosphate
  modified_base 7: mod_base = OTHER; note = 2'-fluoroguanosine-3'-phosphate
  modified_base 8: mod_base = OTHER; note = 2'-O-methyladenosine-3'-phosphate
  modified_base 9: mod_base = OTHER; note = 2'-fluorouridine-3'-phosphate
  modified_base 10: mod_base = OTHER; note = 2'-fluoroadenosine-3'-phosphate
  modified_base 11: mod_base = OTHER; note = 2'-fluorouridine-3'-phosphate
  modified_base 12: mod_base = OTHER; note = 2'-O-methyluridine-3'-phosphate
  modified_base 13: mod_base = OTHER; note = 2'-O-methylguanosine-3'-phosphate
  modified_base 14: mod_base = OTHER; note = 2'-O-methyladenosine-3'-phosphate
  modified_base 15: mod_base = OTHER; note = 2'-O-methyluridine-3'-phosphate
  modified_base 16: mod_base = OTHER; note = 2'-O-methylguanosine-3'-phosphate
  modified_base 17: mod_base = OTHER; note = 2'-O-methylguanosine-3'-phosphate
  modified_base 18: mod_base = OTHER; note = 2'-O-methyladenosine-3'-phosphate
  modified_base 19: mod_base = OTHER; note = 2'-O-methylcytidine-3'-phosphorothioate
  modified_base 20: mod_base = OTHER; note = 2'-O-methyladenosine-3'-phosphorothioate
  modified_base 21: mod_base = OTHER; note = 2'-O-methyladenosine-3'-phosphate
gtagctgatattgatggacaa

SEQ ID NO: 661 - RNA, 21 nt, synthetic construct
  source 1..21: mol_type = other RNA
  modified_base 1: mod_base = OTHER; note = 2'-O-methyladenosine-3'-phosphorothioate
  modified_base 2: mod_base = OTHER; note = 2'-O-methyluridine-3'-phosphorothioate
  modified_base 3: mod_base = OTHER; note = 2'-O-methyluridine-3'-phosphate
  modified_base 4: mod_base = OTHER; note = 2'-O-methylguanosine-3'-phosphate
  modified_base 5: mod_base = OTHER; note = 2'-O-methyladenosine-3'-phosphate
  modified_base 6: mod_base = OTHER; note = 2'-O-methyluridine-3'-phosphate
  modified_base 7: mod_base = OTHER; note = 2'-fluoroguanosine-3'-phosphate
  modified_base 8: mod_base = OTHER; note = 2'-O-methylguanosine-3'-phosphate
  modified_base 9: mod_base = OTHER; note = 2'-fluoroadenosine-3'-phosphate
  modified_base 10: mod_base = OTHER; note = 2'-fluorocytidine-3'-phosphate
  modified_base 11: mod_base = OTHER; note = 2'-fluoroadenosine-3'-phosphate
  modified_base 12: mod_base = OTHER; note = 2'-O-methylguanosine-3'-phosphate
  modified_base 13: mod_base = OTHER; note = 2'-O-methyluridine-3'-phosphate
  modified_base 14: mod_base = OTHER; note = 2'-O-methyladenosine-3'-phosphate
  modified_base 15: mod_base = OTHER; note = 2'-O-methyluridine-3'-phosphate
  modified_base 16: mod_base = OTHER; note = 2'-O-methylguanosine-3'-phosphate
  modified_base 17: mod_base = OTHER; note = 2'-O-methylcytidine-3'-phosphate
  modified_base 18: mod_base = OTHER; note = 2'-O-methyladenosine-3'-phosphate
  modified_base 19: mod_base = OTHER; note = 2'-O-methyladenosine-3'-phosphorothioate
  modified_base 20: mod_base = OTHER; note = 2'-O-methyluridine-3'-phosphorothioate
  modified_base 21: mod_base = OTHER; note = 2'-O-methyladenosine-3'-phosphate
attgatggacagtatgcaata

SEQ ID NO: 662 - RNA, 21 nt, synthetic construct
  source 1..21: mol_type = other RNA
  modified_base 1: mod_base = OTHER; note = 2'-O-methyladenosine-3'-phosphorothioate
  modified_base 2: mod_base = OTHER; note = 2'-O-methylguanosine-3'-phosphorothioate
  modified_base 3: mod_base = OTHER; note = 2'-O-methyluridine-3'-phosphate
  modified_base 4: mod_base = OTHER; note = 2'-O-methyladenosine-3'-phosphate
  modified_base 5: mod_base = OTHER; note = 2'-O-methyluridine-3'-phosphate
  modified_base 6: mod_base = OTHER; note = 2'-O-methylguanosine-3'-phosphate
  modified_base 7: mod_base = OTHER; note = 2'-O-methylcytidine-3'-phosphate
  modified_base 8: mod_base = OTHER; note = 2'-O-methyladenosine-3'-phosphate
  modified_base 9: mod_base = OTHER; note = 2'-fluoroadenosine-3'-phosphate
  modified_base 10: mod_base = OTHER; note = 2'-fluorouridine-3'-phosphate
  modified_base 11: mod_base = OTHER; note = 2'-fluoroguanosine-3'-phosphate
  modified_base 12: mod_base = OTHER; note = 2'-O-methyladenosine-3'-phosphate
  modified_base 13: mod_base = OTHER; note = 2'-O-methylcytidine-3'-phosphate
  modified_base 14: mod_base = OTHER; note = 2'-O-methyluridine-3'-phosphate
  modified_base 15: mod_base = OTHER; note = 2'-O-methylcytidine-3'-phosphate
  modified_base 16: mod_base = OTHER; note = 2'-O-methylguanosine-3'-phosphate
  modified_base 17: mod_base = OTHER; note = 2'-O-methyladenosine-3'-phosphate
  modified_base 18: mod_base = OTHER; note = 2'-O-methylguanosine-3'-phosphate
  modified_base 19: mod_base = OTHER; note = 2'-O-methylcytidine-3'-phosphorothioate
  modified_base 20: mod_base = OTHER; note = 2'-O-methyluridine-3'-phosphorothioate
  modified_base 21: mod_base = OTHER; note = 2'-O-methyladenosine-3'-phosphate
agtatgcaatgactcgagcta

SEQ ID NO: 663 - RNA, 21 nt, synthetic construct
  source 1..21: mol_type = other RNA
  modified_base 1: mod_base = OTHER; note = 2'-O-methylguanosine-3'-phosphorothioate
  modified_base 2: mod_base = OTHER; note = 2'-O-methylguanosine-3'-phosphorothioate
  modified_base 3: mod_base = OTHER; note = 2'-O-methyluridine-3'-phosphate
  modified_base 4: mod_base = OTHER; note = 2'-O-methyladenosine-3'-phosphate
  modified_base 5: mod_base = OTHER; note = 2'-O-methylcytidine-3'-phosphate
  modified_base 6: mod_base = OTHER; note = 2'-O-methylguanosine-3'-phosphate
  modified_base 7: mod_base = OTHER; note = 2'-fluoroadenosine-3'-phosphate
  modified_base 8: mod_base = OTHER; note = 2'-O-methylguanosine-3'-phosphate
  modified_base 9: mod_base = OTHER; note = 2'-fluorocytidine-3'-phosphate
  modified_base 10: mod_base = OTHER; note = 2'-fluorouridine-3'-phosphate
  modified_base 11: mod_base = OTHER; note = 2'-fluoroguanosine-3'-phosphate
  modified_base 12: mod_base = OTHER; note = 2'-O-methylcytidine-3'-phosphate
  modified_base 13: mod_base = OTHER; note = 2'-O-methyluridine-3'-phosphate
  modified_base 14: mod_base = OTHER; note = 2'-O-methyladenosine-3'-phosphate
  modified_base 15: mod_base = OTHER; note = 2'-O-methyluridine-3'-phosphate
  modified_base 16: mod_base = OTHER; note = 2'-O-methylguanosine-3'-phosphate
  modified_base 17: mod_base = OTHER; note = 2'-O-methyluridine-3'-phosphate
  modified_base 18: mod_base = OTHER; note = 2'-O-methyluridine-3'-phosphate
  modified_base 19: mod_base = OTHER; note = 2'-O-methylcytidine-3'-phosphorothioate
  modified_base 20: mod_base = OTHER; note = 2'-O-methylcytidine-3'-phosphorothioate
  modified_base 21: mod_base = OTHER; note = 2'-O-methyladenosine-3'-phosphate
ggtacgagctgctatgttcca

SEQ ID NO: 664 - RNA, 21 nt, synthetic construct
  source 1..21: mol_type = other RNA
  modified_base 1: mod_base = OTHER; note = 2'-O-methyladenosine-3'-phosphorothioate
  modified_base 2: mod_base = OTHER; note = 2'-O-methylcytidine-3'-phosphorothioate
  modified_base 3: mod_base = OTHER; note = 2'-O-methylguanosine-3'-phosphate
  modified_base 4: mod_base = OTHER; note = 2'-O-methyladenosine-3'-phosphate
  modified_base 5: mod_base = OTHER; note = 2'-O-methylguanosine-3'-phosphate
  modified_base 6: mod_base = OTHER; note = 2'-O-methylcytidine-3'-phosphate
  modified_base 7: mod_base = OTHER; note = 2'-O-methyluridine-3'-phosphate
  modified_base 8: mod_base = OTHER; note = 2'-O-methylguanosine-3'-phosphate
  modified_base 9: mod_base = OTHER; note = 2'-fluorocytidine-3'-phosphate
  modified_base 10: mod_base = OTHER; note = 2'-fluorouridine-3'-phosphate
  modified_base 11: mod_base = OTHER; note = 2'-fluoroadenosine-3'-phosphate
  modified_base 12: mod_base = OTHER; note = 2'-O-methyluridine-3'-phosphate
  modified_base 13: mod_base = OTHER; note = 2'-O-methylguanosine-3'-phosphate
  modified_base 14: mod_base = OTHER; note = 2'-O-methyluridine-3'-phosphate
  modified_base 15: mod_base = OTHER; note = 2'-O-methyluridine-3'-phosphate
  modified_base 16: mod_base = OTHER; note = 2'-O-methylcytidine-3'-phosphate
  modified_base 17: mod_base = OTHER; note = 2'-O-methylcytidine-3'-phosphate
  modified_base 18: mod_base = OTHER; note = 2'-O-methylcytidine-3'-phosphate
  modified_base 19: mod_base = OTHER; note = 2'-O-methyluridine-3'-phosphorothioate
  modified_base 20: mod_base = OTHER; note = 2'-O-methylguanosine-3'-phosphorothioate
  modified_base 21: mod_base = OTHER; note = 2'-O-methyladenosine-3'-phosphate
acgagctgctatgttccctga

SEQ ID NO: 665 - RNA, 21 nt, synthetic construct
  source 1..21: mol_type = other RNA
  modified_base 1: mod_base = OTHER; note = 2'-O-methyluridine-3'-phosphorothioate
  modified_base 2: mod_base = OTHER; note = 2'-O-methylguanosine-3'-phosphorothioate
  modified_base 3: mod_base = OTHER; note = 2'-O-methyluridine-3'-phosphate
  modified_base 4: mod_base = OTHER; note = 2'-O-methyluridine-3'-phosphate
  modified_base 5: mod_base = OTHER; note = 2'-O-methylcytidine-3'-phosphate
  modified_base 6: mod_base = OTHER; note = 2'-O-methylcytidine-3'-phosphate
  modified_base 7: mod_base = OTHER; note = 2'-O-methylcytidine-3'-phosphate
  modified_base 8: mod_base = OTHER; note = 2'-O-methyluridine-3'-phosphate
  modified_base 9: mod_base = OTHER; note = 2'-fluoroguanosine-3'-phosphate
  modified_base 10: mod_base = OTHER; note = 2'-fluoroadenosine-3'-phosphate
  modified_base 11: mod_base = OTHER; note = 2'-fluoroguanosine-3'-phosphate
  modified_base 12: mod_base = OTHER; note = 2'-O-methyladenosine-3'-phosphate
  modified_base 13: mod_base = OTHER; note = 2'-O-methylcytidine-3'-phosphate
  modified_base 14: mod_base = OTHER; note = 2'-O-methyladenosine-3'-phosphate
  modified_base 15: mod_base = OTHER; note = 2'-O-methyluridine-3'-phosphate
  modified_base 16: mod_base = OTHER; note = 2'-O-methyluridine-3'-phosphate
  modified_base 17: mod_base = OTHER; note = 2'-O-methyladenosine-3'-phosphate
  modified_base 18: mod_base = OTHER; note = 2'-O-methylguanosine-3'-phosphate
  modified_base 19: mod_base = OTHER; note = 2'-O-methyladenosine-3'-phosphorothioate
  modified_base 20: mod_base = OTHER; note = 2'-O-methyluridine-3'-phosphorothioate
  modified_base 21: mod_base = OTHER; note = 2'-O-methyladenosine-3'-phosphate
tgttccctgagacattagata

SEQ ID NO: 666 - RNA, 21 nt, synthetic construct
  source 1..21: mol_type = other RNA
  modified_base 1: mod_base = OTHER; note = 2'-O-methyluridine-3'-phosphorothioate
  modified_base 2: mod_base = OTHER; note = 2'-O-methyluridine-3'-phosphorothioate
  modified_base 3: mod_base = OTHER; note = 2'-O-methylcytidine-3'-phosphate
  modified_base 4: mod_base = OTHER; note = 2'-O-methylcytidine-3'-phosphate
  modified_base 5: mod_base = OTHER; note = 2'-O-methylcytidine-3'-phosphate
  modified_base 6: mod_base = OTHER; note = 2'-O-methyluridine-3'-phosphate
  modified_base 7: mod_base = OTHER; note = 2'-fluoroguanosine-3'-phosphate
  modified_base 8: mod_base = OTHER; note = 2'-O-methyladenosine-3'-phosphate
  modified_base 9: mod_base = OTHER; note = 2'-fluoroguanosine-3'-phosphate
  modified_base 10: mod_base = OTHER; note = 2'-fluoroadenosine-3'-phosphate
  modified_base 11: mod_base = OTHER; note = 2'-fluorocytidine-3'-phosphate
  modified_base 12: mod_base = OTHER; note = 2'-O-methyladenosine-3'-phosphate
  modified_base 13: mod_base = OTHER; note = 2'-O-methyluridine-3'-phosphate
  modified_base 14: mod_base = OTHER; note = 2'-O-methyluridine-3'-phosphate
  modified_base 15: mod_base = OTHER; note = 2'-O-methyladenosine-3'-phosphate
  modified_base 16: mod_base = OTHER; note = 2'-O-methylguanosine-3'-phosphate
  modified_base 17: mod_base = OTHER; note = 2'-O-methyladenosine-3'-phosphate
  modified_base 18: mod_base = OTHER; note = 2'-O-methyluridine-3'-phosphate
  modified_base 19: mod_base = OTHER; note = 2'-O-methylguanosine-3'-phosphorothioate
  modified_base 20: mod_base = OTHER; note = 2'-O-methyladenosine-3'-phosphorothioate
  modified_base 21: mod_base = OTHER; note = 2'-O-methyladenosine-3'-phosphate
ttccctgagacattagatgaa

SEQ ID NO: 667 - RNA, 21 nt, synthetic construct
  source 1..21: mol_type = other RNA
  modified_base 1: mod_base = OTHER; note = 2'-O-methyladenosine-3'-phosphorothioate
  modified_base 2: mod_base = OTHER; note = 2'-O-methylguanosine-3'-phosphorothioate
  modified_base 3: mod_base = OTHER; note = 2'-O-methyladenosine-3'-phosphate
  modified_base 4: mod_base = OTHER; note = 2'-O-methyluridine-3'-phosphate
  modified_base 5: mod_base = OTHER; note = 2'-O-methylguanosine-3'-phosphate
  modified_base 6: mod_base = OTHER; note = 2'-O-methyladenosine-3'-phosphate
  modified_base 7: mod_base = OTHER; note = 2'-fluoroguanosine-3'-phosphate
  modified_base 8: mod_base = OTHER; note = 2'-O-methylguanosine-3'-phosphate
  modified_base 9: mod_base = OTHER; note = 2'-fluoroguanosine-3'-phosphate
  modified_base 10: mod_base = OTHER; note = 2'-fluorocytidine-3'-phosphate
  modified_base 11: mod_base = OTHER; note = 2'-fluoroadenosine-3'-phosphate
  modified_base 12: mod_base = OTHER; note = 2'-O-methyluridine-3'-phosphate
  modified_base 13: mod_base = OTHER; note = 2'-O-methylguanosine-3'-phosphate
  modified_base 14: mod_base = OTHER; note = 2'-O-methylcytidine-3'-phosphate
  modified_base 15: mod_base = OTHER; note = 2'-O-methyladenosine-3'-phosphate
  modified_base 16: mod_base = OTHER; note = 2'-O-methylguanosine-3'-phosphate
  modified_base 17: mod_base = OTHER; note = 2'-O-methyladenosine-3'-phosphate
  modified_base 18: mod_base = OTHER; note = 2'-O-methyluridine-3'-phosphate
  modified_base 19: mod_base = OTHER; note = 2'-O-methylcytidine-3'-phosphorothioate
  modified_base 20: mod_base = OTHER; note = 2'-O-methylcytidine-3'-phosphorothioate
  modified_base 21: mod_base = OTHER; note = 2'-O-methyladenosine-3'-phosphate
agatgagggcatgcagatcca

SEQ ID NO: 668 - RNA, 21 nt, synthetic construct
  source 1..21: mol_type = other RNA
  modified_base 1: mod_base = OTHER; note = 2'-O-methylcytidine-3'-phosphorothioate
  modified_base 2: mod_base = OTHER; note = 2'-O-methyluridine-3'-phosphorothioate
  modified_base 3: mod_base = OTHER; note = 2'-O-methylguanosine-3'-phosphate
  modified_base 4: mod_base = OTHER; note = 2'-O-methylcytidine-3'-phosphate
  modified_base 5: mod_base = OTHER; note = 2'-O-methyluridine-3'-phosphate
  modified_base 6: mod_base = OTHER; note = 2'-O-methylcytidine-3'-phosphate
  modified_base 7: mod_base = OTHER; note = 2'-O-methyladenosine-3'-phosphate
  modified_base 8: mod_base = OTHER; note = 2'-O-methyluridine-3'-phosphate
  modified_base 9: mod_base = OTHER; note = 2'-fluorocytidine-3'-phosphate
  modified_base 10: mod_base = OTHER; note = 2'-fluorocytidine-3'-phosphate
  modified_base 11: mod_base = OTHER; note = 2'-fluorocytidine-3'-phosphate
  modified_base 12: mod_base = OTHER; note = 2'-O-methyladenosine-3'-phosphate
  modified_base 13: mod_base = OTHER; note = 2'-O-methylcytidine-3'-phosphate
  modified_base 14: mod_base = OTHER; note = 2'-O-methyluridine-3'-phosphate
  modified_base 15: mod_base = OTHER; note = 2'-O-methyladenosine-3'-phosphate
  modified_base 16: mod_base = OTHER; note = 2'-O-methyladenosine-3'-phosphate
  modified_base 17: mod_base = OTHER; note = 2'-O-methyluridine-3'-phosphate
  modified_base 18: mod_base = OTHER; note = 2'-O-methylguanosine-3'-phosphate
  modified_base 19: mod_base = OTHER; note = 2'-O-methyluridine-3'-phosphorothioate
  modified_base 20: mod_base = OTHER; note = 2'-O-methylcytidine-3'-phosphorothioate
  modified_base 21: mod_base = OTHER; note = 2'-O-methyladenosine-3'-phosphate
ctgctcatcccactaatgtca

SEQ ID NO: 669 - RNA, 21 nt, synthetic construct
  source 1..21: mol_type = other RNA
  modified_base 1: mod_base = OTHER; note = 2'-O-methyladenosine-3'-phosphorothioate
  modified_base 2: mod_base = OTHER; note = 2'-O-methylcytidine-3'-phosphorothioate
  modified_base 3: mod_base = OTHER; note = 2'-O-methylcytidine-3'-phosphate
  modified_base 4: mod_base = OTHER; note = 2'-O-methyladenosine-3'-phosphate
  modified_base 5: mod_base = OTHER; note = 2'-O-methyluridine-3'-phosphate
  modified_base 6: mod_base = OTHER; note = 2'-O-methylcytidine-3'-phosphate
  modified_base 7: mod_base = OTHER; note = 2'-fluoroadenosine-3'-phosphate
  modified_base 8: mod_base = OTHER; note = 2'-O-methylcytidine-3'-phosphate
  modified_base 9: mod_base = OTHER; note = 2'-fluoroadenosine-3'-phosphate
  modified_base 10: mod_base = OTHER; note = 2'-fluoroguanosine-3'-phosphate
  modified_base 11: mod_base = OTHER; note = 2'-fluoroadenosine-3'-phosphate
  modified_base 12: mod_base = OTHER; note = 2'-O-methyluridine-3'-phosphate
  modified_base 13: mod_base = OTHER; note = 2'-O-methylguanosine-3'-phosphate
  modified_base 14: mod_base = OTHER; note = 2'-O-methylcytidine-3'-phosphate
  modified_base 15: mod_base = OTHER; note = 2'-O-methyluridine-3'-phosphate
  modified_base 16: mod_base = OTHER; note = 2'-O-methylguanosine-3'-phosphate
  modified_base 17: mod_base = OTHER; note = 2'-O-methyladenosine-3'-phosphate
  modified_base 18: mod_base = OTHER; note = 2'-O-methyladenosine-3'-phosphate
  modified_base 19: mod_base = OTHER; note = 2'-O-methyladenosine-3'-phosphorothioate
  modified_base 20: mod_base = OTHER; note = 2'-O-methylcytidine-3'-phosphorothioate
  modified_base 21: mod_base = OTHER; note = 2'-O-methyladenosine-3'-phosphate
accatcacagatgctgaaaca

SEQ ID NO: 670 - RNA, 21 nt, synthetic construct
  source 1..21: mol_type = other RNA
  modified_base 1: mod_base = OTHER; note = 2'-O-methylcytidine-3'-phosphorothioate
  modified_base 2: mod_base = OTHER; note = 2'-O-methyladenosine-3'-phosphorothioate
  modified_base 3: mod_base = OTHER; note = 2'-O-methyluridine-3'-phosphate
  modified_base 4: mod_base = OTHER; note = 2'-O-methylcytidine-3'-phosphate
  modified_base 5: mod_base = OTHER; note = 2'-O-methyladenosine-3'-phosphate
  modified_base 6: mod_base = OTHER; note = 2'-O-methylcytidine-3'-phosphate
  modified_base 7: mod_base = OTHER; note = 2'-fluoroadenosine-3'-phosphate
  modified_base 8: mod_base = OTHER; note = 2'-O-methylguanosine-3'-phosphate
  modified_base 9: mod_base = OTHER; note = 2'-fluoroadenosine-3'-phosphate
  modified_base 10: mod_base = OTHER; note = 2'-fluorouridine-3'-phosphate
  modified_base 11: mod_base = OTHER; note = 2'-fluoroguanosine-3'-phosphate
  modified_base 12: mod_base = OTHER; note = 2'-O-methylcytidine-3'-phosphate
  modified_base 13: mod_base = OTHER; note = 2'-O-methyluridine-3'-phosphate
  modified_base 14: mod_base = OTHER; note = 2'-O-methylguanosine-3'-phosphate
  modified_base 15: mod_base = OTHER; note = 2'-O-methyladenosine-3'-phosphate
  modified_base 16: mod_base = OTHER; note = 2'-O-methyladenosine-3'-phosphate
  modified_base 17: mod_base = OTHER; note = 2'-O-methyladenosine-3'-phosphate
  modified_base 18: mod_base = OTHER; note = 2'-O-methylcytidine-3'-phosphate
  modified_base 19: mod_base = OTHER; note = 2'-O-methyladenosine-3'-phosphorothioate
  modified_base 20: mod_base = OTHER; note = 2'-O-methyluridine-3'-phosphorothioate
  modified_base 21: mod_base = OTHER; note = 2'-O-methyladenosine-3'-phosphate
catcacagatgctgaaacata

SEQ ID NO: 671 - RNA, 21 nt, synthetic construct
  source 1..21: mol_type = other RNA
  modified_base 1: mod_base = OTHER; note = 2'-O-methylcytidine-3'-phosphorothioate
  modified_base 2: mod_base = OTHER; note = 2'-O-methyladenosine-3'-phosphorothioate
  modified_base 3: mod_base = OTHER; note = 2'-O-methyluridine-3'-phosphate
  modified_base 4: mod_base = OTHER; note = 2'-O-methylcytidine-3'-phosphate
  modified_base 5: mod_base = OTHER; note = 2'-O-methyladenosine-3'-phosphate
  modified_base 6: mod_base = OTHER; note = 2'-O-methylcytidine-3'-phosphate
  modified_base 7: mod_base = OTHER; note = 2'-O-methyladenosine-3'-phosphate
  modified_base 8: mod_base = OTHER; note = 2'-O-methylguanosine-3'-phosphate
  modified_base 9: mod_base = OTHER; note = 2'-fluoroadenosine-3'-phosphate
  modified_base 10: mod_base = OTHER; note = 2'-fluorouridine-3'-phosphate
  modified_base 11: mod_base = OTHER; note = 2'-fluoroguanosine-3'-phosphate
  modified_base 12: mod_base = OTHER; note = 2'-O-methylcytidine-3'-phosphate
  modified_base 13: mod_base = OTHER; note = 2'-O-methyluridine-3'-phosphate
  modified_base 14: mod_base = OTHER; note = 2'-O-methylguanosine-3'-phosphate
  modified_base 15: mod_base = OTHER; note = 2'-O-methyladenosine-3'-phosphate
  modified_base 16: mod_base = OTHER; note = 2'-O-methyladenosine-3'-phosphate
  modified_base 17: mod_base = OTHER; note = 2'-O-methyladenosine-3'-phosphate
  modified_base 18: mod_base = OTHER; note = 2'-O-methylcytidine-3'-phosphate
  modified_base 19: mod_base = OTHER; note = 2'-O-methyladenosine-3'-phosphorothioate
  modified_base 20: mod_base = OTHER; note = 2'-O-methyluridine-3'-phosphorothioate
  modified_base 21: mod_base = OTHER; note = 2'-O-methyladenosine-3'-phosphate
catcacagatgctgaaacata

SEQ ID NO: 672 - RNA, 21 nt, synthetic construct
  source 1..21: mol_type = other RNA
  modified_base 1: mod_base = OTHER; note = 2'-O-methyladenosine-3'-phosphorothioate
  modified_base 2: mod_base = OTHER; note = 2'-O-methyluridine-3'-phosphorothioate
  modified_base 3: mod_base = OTHER; note = 2'-O-methylguanosine-3'-phosphate
  modified_base 4: mod_base = OTHER; note = 2'-O-methylcytidine-3'-phosphate
  modified_base 5: mod_base = OTHER; note = 2'-O-methyluridine-3'-phosphate
  modified_base 6: mod_base = OTHER; note = 2'-O-methylguanosine-3'-phosphate
  modified_base 7: mod_base = OTHER; note = 2'-fluoroadenosine-3'-phosphate
  modified_base 8: mod_base = OTHER; note = 2'-O-methyladenosine-3'-phosphate
  modified_base 9: mod_base = OTHER; note = 2'-fluoroadenosine-3'-phosphate
  modified_base 10: mod_base = OTHER; note = 2'-fluorocytidine-3'-phosphate
  modified_base 11: mod_base = OTHER; note = 2'-fluoroadenosine-3'-phosphate
  modified_base 12: mod_base = OTHER; note = 2'-O-methyluridine-3'-phosphate
  modified_base 13: mod_base = OTHER; note = 2'-O-methylguanosine-3'-phosphate
  modified_base 14: mod_base = OTHER; note = 2'-O-methylcytidine-3'-phosphate
  modified_base 15: mod_base = OTHER; note = 2'-O-methyladenosine-3'-phosphate
  modified_base 16: mod_base = OTHER; note = 2'-O-methylguanosine-3'-phosphate
  modified_base 17: mod_base = OTHER; note = 2'-O-methyluridine-3'-phosphate
  modified_base 18: mod_base = OTHER; note = 2'-O-methyluridine-3'-phosphate
  modified_base 19: mod_base = OTHER; note = 2'-O-methylguanosine-3'-phosphorothioate
  modified_base 20: mod_base = OTHER; note = 2'-O-methyluridine-3'-phosphorothioate
  modified_base 21: mod_base = OTHER; note = 2'-O-methyladenosine-3'-phosphate
atgctgaaacatgcagttgta

SEQ ID NO: 673 - RNA, 21 nt, synthetic construct
  source 1..21: mol_type = other RNA
  modified_base 1: mod_base = OTHER; note = 2'-O-methyladenosine-3'-phosphorothioate
  modified_base 2: mod_base = OTHER; note = 2'-O-methyluridine-3'-phosphorothioate
  modified_base 3: mod_base = OTHER; note = 2'-O-methylguanosine-3'-phosphate
  modified_base 4: mod_base = OTHER; note = 2'-O-methylcytidine-3'-phosphate
  modified_base 5: mod_base = OTHER; note = 2'-O-methyluridine-3'-phosphate
  modified_base 6: mod_base = OTHER; note = 2'-O-methylguanosine-3'-phosphate
  modified_base 7: mod_base = OTHER; note = 2'-O-methyladenosine-3'-phosphate
  modified_base 8: mod_base = OTHER; note = 2'-O-methyladenosine-3'-phosphate
  modified_base 9: mod_base = OTHER; note = 2'-fluoroadenosine-3'-phosphate
  modified_base 10: mod_base = OTHER; note = 2'-fluorocytidine-3'-phosphate
  modified_base 11: mod_base = OTHER; note = 2'-fluoroadenosine-3'-phosphate
  modified_base 12: mod_base = OTHER; note = 2'-O-methyluridine-3'-phosphate
  modified_base 13: mod_base = OTHER; note = 2'-O-methylguanosine-3'-phosphate
  modified_base 14: mod_base = OTHER; note = 2'-O-methylcytidine-3'-phosphate
  modified_base 15: mod_base = OTHER; note = 2'-O-methyladenosine-3'-phosphate
  modified_base 16: mod_base = OTHER; note = 2'-O-methylguanosine-3'-phosphate
  modified_base 17: mod_base = OTHER; note = 2'-O-methyluridine-3'-phosphate
  modified_base 18: mod_base = OTHER; note = 2'-O-methyluridine-3'-phosphate
  modified_base 19: mod_base = OTHER; note = 2'-O-methylguanosine-3'-phosphorothioate
  modified_base 20: mod_base = OTHER; note = 2'-O-methyluridine-3'-phosphorothioate
  modified_base 21: mod_base = OTHER; note = 2'-O-methyladenosine-3'-phosphate
atgctgaaacatgcagttgta

SEQ ID NO: 674 - RNA, 21 nt, synthetic construct
  source 1..21: mol_type = other RNA
  modified_base 1: mod_base = OTHER; note = 2'-O-methyladenosine-3'-phosphorothioate
  modified_base 2: mod_base = OTHER; note = 2'-O-methylcytidine-3'-phosphorothioate
  modified_base 3: mod_base = OTHER; note = 2'-O-methyladenosine-3'-phosphate
  modified_base 4: mod_base = OTHER; note = 2'-O-methyluridine-3'-phosphate
  modified_base 5: mod_base = OTHER; note = 2'-O-methylguanosine-3'-phosphate
  modified_base 6: mod_base = OTHER; note = 2'-O-methylcytidine-3'-phosphate
  modified_base 7: mod_base = OTHER; note = 2'-fluoroadenosine-3'-phosphate
  modified_base 8: mod_base = OTHER; note = 2'-O-methylguanosine-3'-phosphate
  modified_base 9: mod_base = OTHER; note = 2'-fluorouridine-3'-phosphate
  modified_base 10: mod_base = OTHER; note = 2'-fluorouridine-3'-phosphate
  modified_base 11: mod_base = OTHER; note = 2'-fluoroguanosine-3'-phosphate
  modified_base 12: mod_base = OTHER; note = 2'-O-methyluridine-3'-phosphate
  modified_base 13: mod_base = OTHER; note = 2'-O-methyladenosine-3'-phosphate
  modified_base 14: mod_base = OTHER; note = 2'-O-methyladenosine-3'-phosphate
  modified_base 15: mod_base = OTHER; note = 2'-O-methyladenosine-3'-phosphate
  modified_base 16: mod_base = OTHER; note = 2'-O-methylcytidine-3'-phosphate
  modified_base 17: mod_base = OTHER; note = 2'-O-methyluridine-3'-phosphate
  modified_base 18: mod_base = OTHER; note = 2'-O-methyluridine-3'-phosphate
  modified_base 19: mod_base = OTHER; note = 2'-O-methylguanosine-3'-phosphorothioate
  modified_base 20: mod_base = OTHER; note = 2'-O-methyladenosine-3'-phosphorothioate
  modified_base 21: mod_base = OTHER; note = 2'-O-methyladenosine-3'-phosphate
acatgcagttgtaaacttgaa

SEQ ID NO: 675 - RNA, 21 nt, synthetic construct
  source 1..21: mol_type = other RNA
  modified_base 1: mod_base = OTHER; note = 2'-O-methyladenosine-3'-phosphorothioate
  modified_base 2: mod_base = OTHER; note = 2'-O-methyluridine-3'-phosphorothioate
  modified_base 3: mod_base = OTHER; note = 2'-O-methylguanosine-3'-phosphate
  modified_base 4: mod_base = OTHER; note = 2'-O-methylcytidine-3'-phosphate
  modified_base 5: mod_base = OTHER; note = 2'-O-methyladenosine-3'-phosphate
  modified_base 6: mod_base = OTHER; note = 2'-O-methylguanosine-3'-phosphate
  modified_base 7: mod_base = OTHER; note = 2'-fluorouridine-3'-phosphate
  modified_base 8: mod_base = OTHER; note = 2'-O-methyluridine-3'-phosphate
  modified_base 9: mod_base = OTHER; note = 2'-fluoroguanosine-3'-phosphate
  modified_base 10: mod_base = OTHER; note = 2'-fluorouridine-3'-phosphate
  modified_base 11: mod_base = OTHER; note = 2'-fluoroadenosine-3'-phosphate
  modified_base 12: mod_base = OTHER; note = 2'-O-methyladenosine-3'-phosphate
  modified_base 13: mod_base = OTHER; note = 2'-O-methyladenosine-3'-phosphate
  modified_base 14: mod_base = OTHER; note = 2'-O-methylcytidine-3'-phosphate
  modified_base 15: mod_base = OTHER; note = 2'-O-methyluridine-3'-phosphate
  modified_base 16: mod_base = OTHER; note = 2'-O-methyluridine-3'-phosphate
  modified_base 17: mod_base = OTHER; note = 2'-O-methylguanosine-3'-phosphate
  modified_base 18: mod_base = OTHER; note = 2'-O-methyladenosine-3'-phosphate
  modified_base 19: mod_base = OTHER; note = 2'-O-methyluridine-3'-phosphorothioate
  modified_base 20: mod_base = OTHER; note = 2'-O-methyluridine-3'-phosphorothioate
  modified_base 21: mod_base = OTHER; note = 2'-O-methyladenosine-3'-phosphate
atgcagttgtaaacttgatta

SEQ ID NO: 676 - RNA, 21 nt, synthetic construct
  source 1..21: mol_type = other RNA
  modified_base 1: mod_base = OTHER; note = 2'-O-methyladenosine-3'-phosphorothioate
  modified_base 2: mod_base = OTHER; note = 2'-O-methyluridine-3'-phosphorothioate
  modified_base 3: mod_base = OTHER; note = 2'-O-methylguanosine-3'-phosphate
  modified_base 4: mod_base = OTHER; note = 2'-O-methylcytidine-3'-phosphate
  modified_base 5: mod_base = OTHER; note = 2'-O-methyladenosine-3'-phosphate
  modified_base 6: mod_base = OTHER; note = 2'-O-methylguanosine-3'-phosphate
  modified_base 7: mod_base = OTHER; note = 2'-O-methyluridine-3'-phosphate
  modified_base 8: mod_base = OTHER; note = 2'-O-methyluridine-3'-phosphate
  modified_base 9: mod_base = OTHER; note = 2'-fluoroguanosine-3'-phosphate
  modified_base 10: mod_base = OTHER; note = 2'-fluorouridine-3'-phosphate
  modified_base 11: mod_base = OTHER; note = 2'-fluoroadenosine-3'-phosphate
  modified_base 12: mod_base = OTHER; note = 2'-O-methyladenosine-3'-phosphate
  modified_base 13: mod_base = OTHER; note = 2'-O-methyladenosine-3'-phosphate
  modified_base 14: mod_base = OTHER; note = 2'-O-methylcytidine-3'-phosphate
  modified_base 15: mod_base = OTHER; note = 2'-O-methyluridine-3'-phosphate
  modified_base 16: mod_base = OTHER; note = 2'-O-methyluridine-3'-phosphate
  modified_base 17: mod_base = OTHER; note = 2'-O-methylguanosine-3'-phosphate
  modified_base 18: mod_base = OTHER; note = 2'-O-methyladenosine-3'-phosphate
  modified_base 19: mod_base = OTHER; note = 2'-O-methyluridine-3'-phosphorothioate
  modified_base 20: mod_base = OTHER; note = 2'-O-methyluridine-3'-phosphorothioate
  modified_base 21: mod_base = OTHER; note = 2'-O-methyladenosine-3'-phosphate
atgcagttgtaaacttgatta

SEQ ID NO: 677 - RNA, 21 nt, synthetic construct
  source 1..21: mol_type = other RNA
  modified_base 1: mod_base = OTHER; note = 2'-O-methyladenosine-3'-phosphorothioate
  modified_base 2: mod_base = OTHER; note = 2'-O-methylcytidine-3'-phosphorothioate
  modified_base 3: mod_base = OTHER; note = 2'-O-methylguanosine-3'-phosphate
  modified_base 4: mod_base = OTHER; note = 2'-O-methyluridine-3'-phosphate
  modified_base 5: mod_base = OTHER; note = 2'-O-methylguanosine-3'-phosphate
  modified_base 6: mod_base = OTHER; note = 2'-O-methylcytidine-3'-phosphate
  modified_base 7: mod_base = OTHER; note = 2'-fluoroadenosine-3'-phosphate
  modified_base 8: mod_base = OTHER; note = 2'-O-methyladenosine-3'-phosphate
  modified_base 9: mod_base = OTHER; note = 2'-fluorouridine-3'-phosphate
  modified_base 10: mod_base = OTHER; note = 2'-fluorocytidine-3'-phosphate
  modified_base 11: mod_base = OTHER; note = 2'-fluorocytidine-3'-phosphate
  modified_base 12: mod_base = OTHER; note = 2'-O-methylcytidine-3'-phosphate
  modified_base 13: mod_base = OTHER; note = 2'-O-methyluridine-3'-phosphate
  modified_base 14: mod_base = OTHER; note = 2'-O-methylguanosine-3'-phosphate
  modified_base 15: mod_base = OTHER; note = 2'-O-methyladenosine-3'-phosphate
  modified_base 16: mod_base = OTHER; note = 2'-O-methyladenosine-3'-phosphate
  modified_base 17: mod_base = OTHER; note = 2'-O-methylcytidine-3'-phosphate
  modified_base 18: mod_base = OTHER; note = 2'-O-methyluridine-3'-phosphate
  modified_base 19: mod_base = OTHER; note = 2'-O-methylguanosine-3'-phosphorothioate
  modified_base 20: mod_base = OTHER; note = 2'-O-methyladenosine-3'-phosphorothioate
  modified_base 21: mod_base = OTHER; note = 2'-O-methyladenosine-3'-phosphate
acgtgcaatccctgaactgaa

SEQ ID NO: 678 - RNA, 21 nt, synthetic construct
  source 1..21: mol_type = other RNA
  modified_base 1: mod_base = OTHER; note = 2'-O-methyluridine-3'-phosphorothioate
  modified_base 2: mod_base = OTHER; note = 2'-O-methylguanosine-3'-phosphorothioate
  modified_base 3: mod_base = OTHER; note = 2'-O-methylcytidine-3'-phosphate
  modified_base 4: mod_base = OTHER; note = 2'-O-methyladenosine-3'-phosphate
  modified_base 5: mod_base = OTHER; note = 2'-O-methyladenosine-3'-phosphate
  modified_base 6: mod_base = OTHER; note = 2'-O-methyluridine-3'-phosphate
  modified_base 7: mod_base = OTHER; note = 2'-fluorocytidine-3'-phosphate
  modified_base 8: mod_base = OTHER; note = 2'-O-methylcytidine-3'-phosphate
  modified_base 9: mod_base = OTHER; note = 2'-fluorocytidine-3'-phosphate
  modified_base 10: mod_base = OTHER; note = 2'-fluorouridine-3'-phosphate
  modified_base 11: mod_base = OTHER; note = 2'-fluoroguanosine-3'-phosphate
  modified_base 12: mod_base = OTHER; note = 2'-O-methyladenosine-3'-phosphate
  modified_base 13: mod_base = OTHER; note = 2'-O-methyladenosine-3'-phosphate
  modified_base 14: mod_base = OTHER; note = 2'-O-methylcytidine-3'-phosphate
  modified_base 15: mod_base = OTHER; note = 2'-O-methyluridine-3'-phosphate
  modified_base 16: mod_base = OTHER; note = 2'-O-methylguanosine-3'-phosphate
  modified_base 17: mod_base = OTHER; note = 2'-O-methyladenosine-3'-phosphate
  modified_base 18: mod_base = OTHER; note = 2'-O-methylcytidine-3'-phosphate
  modified_base 19: mod_base = OTHER; note = 2'-O-methyladenosine-3'-phosphorothioate
  modified_base 20: mod_base = OTHER; note = 2'-O-methyladenosine-3'-phosphorothioate
  modified_base 21: mod_base = OTHER; note = 2'-O-methyladenosine-3'-phosphate
tgcaatccctgaactgacaaa

SEQ ID NO: 679 - RNA, 21 nt, synthetic construct
  source 1..21: mol_type = other RNA
  modified_base 1: mod_base = OTHER; note = 2'-O-methylguanosine-3'-phosphorothioate
  modified_base 2: mod_base = OTHER; note = 2'-O-methyladenosine-3'-phosphorothioate
  modified_base 3: mod_base = OTHER; note = 2'-O-methylcytidine-3'-phosphate
  modified_base 4: mod_base = OTHER; note = 2'-O-methylcytidine-3'-phosphate
  modified_base 5: mod_base = OTHER; note = 2'-O-methyladenosine-3'-phosphate
  modified_base 6: mod_base = OTHER; note = 2'-O-methylguanosine-3'-phosphate
  modified_base 7: mod_base = OTHER; note = 2'-fluoroguanosine-3'-phosphate
  modified_base 8: mod_base = OTHER; note = 2'-O-methyluridine-3'-phosphate
  modified_base 9: mod_base = OTHER; note = 2'-fluoroguanosine-3'-phosphate
  modified_base 10: mod_base = OTHER; note = 2'-fluoroguanosine-3'-phosphate
  modified_base 11: mod_base = OTHER; note = 2'-fluorouridine-3'-phosphate
  modified_base 12: mod_base = OTHER; note = 2'-O-methylguanosine-3'-phosphate
  modified_base 13: mod_base = OTHER; note = 2'-O-methylguanosine-3'-phosphate
  modified_base 14: mod_base = OTHER; note = 2'-O-methyluridine-3'-phosphate
  modified_base 15: mod_base = OTHER; note = 2'-O-methyluridine-3'-phosphate
  modified_base 16: mod_base = OTHER; note = 2'-O-methyladenosine-3'-phosphate
  modified_base 17: mod_base = OTHER; note = 2'-O-methyladenosine-3'-phosphate
  modified_base 18: mod_base = OTHER; note = 2'-O-methyluridine-3'-phosphate
  modified_base 19: mod_base = OTHER; note = 2'-O-methyladenosine-3'-phosphorothioate
  modified_base 20: mod_base = OTHER; note = 2'-O-methyladenosine-3'-phosphorothioate
  modified_base 21: mod_base = OTHER; note = 2'-O-methyladenosine-3'-phosphate
gaccaggtggtggttaataaa

SEQ ID NO: 680 - RNA, 21 nt, synthetic construct
  source 1..21: mol_type = other RNA
  modified_base 1: mod_base = OTHER; note = 2'-O-methylguanosine-3'-phosphorothioate
  modified_base 2: mod_base = OTHER; note = 2'-O-methyladenosine-3'-phosphorothioate
  modified_base 3: mod_base = OTHER; note = 2'-O-methylcytidine-3'-phosphate
  modified_base 4: mod_base = OTHER; note = 2'-O-methylcytidine-3'-phosphate
  modified_base 5: mod_base = OTHER; note = 2'-O-methyladenosine-3'-phosphate
  modified_base 6: mod_base = OTHER; note = 2'-O-methylguanosine-3'-phosphate
  modified_base 7: mod_base = OTHER; note = 2'-O-methylguanosine-3'-phosphate
  modified_base 8: mod_base = OTHER; note = 2'-O-methyluridine-3'-phosphate
  modified_base 9: mod_base = OTHER; note = 2'-fluoroguanosine-3'-phosphate
  modified_base 10: mod_base = OTHER; note = 2'-fluoroguanosine-3'-phosphate
  modified_base 11: mod_base = OTHER; note = 2'-fluorouridine-3'-phosphate
  modified_base 12: mod_base = OTHER; note = 2'-O-methylguanosine-3'-phosphate
  modified_base 13: mod_base = OTHER; note = 2'-O-methylguanosine-3'-phosphate
  modified_base 14: mod_base = OTHER; note = 2'-O-methyluridine-3'-phosphate
  modified_base 15: mod_base = OTHER; note = 2'-O-methyluridine-3'-phosphate
  modified_base 16: mod_base = OTHER; note = 2'-O-methyladenosine-3'-phosphate
  modified_base 17: mod_base = OTHER; note = 2'-O-methyladenosine-3'-phosphate
  modified_base 18: mod_base = OTHER; note = 2'-O-methyluridine-3'-phosphate
  modified_base 19: mod_base = OTHER; note = 2'-O-methyladenosine-3'-phosphorothioate
  modified_base 20: mod_base = OTHER; note = 2'-O-methyladenosine-3'-phosphorothioate
  modified_base 21: mod_base = OTHER; note = 2'-O-methyladenosine-3'-phosphate
gaccaggtggtggttaataaa

SEQ ID NO: 681 - RNA, 21 nt, synthetic construct
  source 1..21: mol_type = other RNA
  modified_base 1: mod_base = OTHER; note = 2'-O-methylcytidine-3'-phosphorothioate
  modified_base 2: mod_base = OTHER; note = 2'-O-methylcytidine-3'-phosphorothioate
  modified_base 3: mod_base = OTHER; note = 2'-O-methyladenosine-3'-phosphate
  modified_base 4: mod_base = OTHER; note = 2'-O-methylguanosine-3'-phosphate
  modified_base 5: mod_base = OTHER; note = 2'-O-methylguanosine-3'-phosphate
  modified_base 6: mod_base = OTHER; note = 2'-O-methyluridine-3'-phosphate
  modified_base 7: mod_base = OTHER; note = 2'-O-methylguanosine-3'-phosphate
  modified_base 8: mod_base = OTHER; note = 2'-O-methylguanosine-3'-phosphate
  modified_base 9: mod_base = OTHER; note = 2'-fluorouridine-3'-phosphate
  modified_base 10: mod_base = OTHER; note = 2'-fluoroguanosine-3'-phosphate
  modified_base 11: mod_base = OTHER; note = 2'-fluoroguanosine-3'-phosphate
  modified_base 12: mod_base = OTHER; note = 2'-O-methyluridine-3'-phosphate
  modified_base 13: mod_base = OTHER; note = 2'-O-methyluridine-3'-phosphate
  modified_base 14: mod_base = OTHER; note = 2'-O-methyladenosine-3'-phosphate
  modified_base 15: mod_base = OTHER; note = 2'-O-methyladenosine-3'-phosphate
  modified_base 16: mod_base = OTHER; note = 2'-O-methyluridine-3'-phosphate
  modified_base 17: mod_base = OTHER; note = 2'-O-methyladenosine-3'-phosphate
  modified_base 18: mod_base = OTHER; note = 2'-O-methyladenosine-3'-phosphate
  modified_base 19: mod_base = OTHER; note = 2'-O-methylguanosine-3'-phosphorothioate
  modified_base 20: mod_base = OTHER; note = 2'-O-methylguanosine-3'-phosphorothioate
  modified_base 21: mod_base = OTHER; note = 2'-O-methyladenosine-3'-phosphate
ccaggtggtggttaataagga

SEQ ID NO: 682 - RNA, 21 nt, synthetic construct
  source 1..21: mol_type = other RNA
  modified_base 1: mod_base = OTHER; note = 2'-O-methylguanosine-3'-phosphorothioate
  modified_base 2: mod_base = OTHER; note = 2'-O-methyluridine-3'-phosphorothioate
  modified_base 3: mod_base = OTHER; note = 2'-O-methyluridine-3'-phosphate
  modified_base 4: mod_base = OTHER; note = 2'-O-methyladenosine-3'-phosphate
  modified_base 5: mod_base = OTHER; note = 2'-O-methyladenosine-3'-phosphate
  modified_base 6: mod_base = OTHER; note = 2'-O-methyluridine-3'-phosphate
  modified_base 7: mod_base = OTHER; note = 2'-fluoroadenosine-3'-phosphate
  modified_base 8: mod_base = OTHER; note = 2'-O-methyladenosine-3'-phosphate
  modified_base 9: mod_base = OTHER; note = 2'-fluoroguanosine-3'-phosphate
  modified_base 10: mod_base = OTHER; note = 2'-fluoroguanosine-3'-phosphate
  modified_base 11: mod_base = OTHER; note = 2'-fluorocytidine-3'-phosphate
  modified_base 12: mod_base = OTHER; note = 2'-O-methyluridine-3'-phosphate
  modified_base 13: mod_base = OTHER; note = 2'-O-methylguanosine-3'-phosphate
  modified_base 14: mod_base = OTHER; note = 2'-O-methylcytidine-3'-phosphate
  modified_base 15: mod_base = OTHER; note = 2'-O-methyladenosine-3'-phosphate
  modified_base 16: mod_base = OTHER; note = 2'-O-methylguanosine-3'-phosphate
  modified_base 17: mod_base = OTHER; note = 2'-O-methyluridine-3'-phosphate
  modified_base 18: mod_base = OTHER; note = 2'-O-methyluridine-3'-phosphate
  modified_base 19: mod_base = OTHER; note = 2'-O-methyladenosine-3'-phosphorothioate
  modified_base 20: mod_base = OTHER; note = 2'-O-methyluridine-3'-phosphorothioate
  modified_base 21: mod_base = OTHER; note = 2'-O-methyladenosine-3'-phosphate
gttaataaggctgcagttata

SEQ ID NO: 683 - RNA, 21 nt, synthetic construct
  source 1..21: mol_type = other RNA
  modified_base 1: mod_base = OTHER; note = 2'-O-methylcytidine-3'-phosphorothioate
  modified_base 2: mod_base = OTHER; note = 2'-O-methylcytidine-3'-phosphorothioate
  modified_base 3: mod_base = OTHER; note = 2'-O-methyluridine-3'-phosphate
  modified_base 4: mod_base = OTHER; note = 2'-O-methylcytidine-3'-phosphate
  modified_base 5: mod_base = OTHER; note = 2'-O-methyladenosine-3'-phosphate
  modified_base 6: mod_base = OTHER; note = 2'-O-methylguanosine-3'-phosphate
  modified_base 7: mod_base = OTHER; note = 2'-fluoroadenosine-3'-phosphate
  modified_base 8: mod_base = OTHER; note = 2'-O-methyluridine-3'-phosphate
  modified_base 9: mod_base = OTHER; note = 2'-fluoroguanosine-3'-phosphate
  modified_base 10: mod_base = OTHER; note = 2'-fluoroguanosine-3'-phosphate
  modified_base 11: mod_base = OTHER; note = 2'-fluorouridine-3'-phosphate
  modified_base 12: mod_base = OTHER; note = 2'-O-methylguanosine-3'-phosphate
  modified_base 13: mod_base = OTHER; note = 2'-O-methyluridine-3'-phosphate
  modified_base 14: mod_base = OTHER; note = 2'-O-methylcytidine-3'-phosphate
  modified_base 15: mod_base = OTHER; note = 2'-O-methyluridine-3'-phosphate
  modified_base 16: mod_base = OTHER; note = 2'-O-methylguanosine-3'-phosphate
  modified_base 17: mod_base = OTHER; note = 2'-O-methylcytidine-3'-phosphate
  modified_base 18: mod_base = OTHER; note = 2'-O-methyluridine-3'-phosphate
  modified_base 19: mod_base = OTHER; note = 2'-O-methyladenosine-3'-phosphorothioate
  modified_base 20: mod_base = OTHER; note = 2'-O-methyluridine-3'-phosphorothioate
  modified_base 21: mod_base = OTHER; note = 2'-O-methyladenosine-3'-phosphate
cctcagatggtgtctgctata

SEQ ID NO: 684 - RNA, 21 nt, synthetic construct
  source 1..21: mol_type = other RNA
  modified_base 1: mod_base = OTHER; note = 2'-O-methyluridine-3'-phosphorothioate
  modified_base 2: mod_base = OTHER; note = 2'-O-methylcytidine-3'-phosphorothioate
  modified_base 3: mod_base = OTHER; note = 2'-O-methyladenosine-3'-phosphate
  modified_base 4: mod_base = OTHER; note = 2'-O-methylguanosine-3'-phosphate
  modified_base 5: mod_base = OTHER; note = 2'-O-methyladenosine-3'-phosphate
  modified_base 6: mod_base = OTHER; note = 2'-O-methyluridine-3'-phosphate
  modified_base 7: mod_base = OTHER; note = 2'-O-methylguanosine-3'-phosphate
  modified_base 8: mod_base = OTHER; note = 2'-O-methylguanosine-3'-phosphate
  modified_base 9: mod_base = OTHER; note = 2'-fluorouridine-3'-phosphate
  modified_base 10: mod_base = OTHER; note = 2'-fluoroguanosine-3'-phosphate
  modified_base 11: mod_base = OTHER; note = 2'-fluorouridine-3'-phosphate
  modified_base 12: mod_base = OTHER; note = 2'-O-methylcytidine-3'-phosphate
  modified_base 13: mod_base = OTHER; note = 2'-O-methyluridine-3'-phosphate
  modified_base 14: mod_base = OTHER; note = 2'-O-methylguanosine-3'-phosphate
  modified_base 15: mod_base = OTHER; note = 2'-O-methylcytidine-3'-phosphate
  modified_base 16: mod_base = OTHER; note = 2'-O-methyluridine-3'-phosphate
  modified_base 17: mod_base = OTHER; note = 2'-O-methyladenosine-3'-phosphate
  modified_base 18: mod_base = OTHER; note = 2'-O-methyluridine-3'-phosphate
  modified_base 19: mod_base = OTHER; note = 2'-O-methyluridine-3'-phosphorothioate
  modified_base 20: mod_base = OTHER; note = 2'-O-methylguanosine-3'-phosphorothioate
  modified_base 21: mod_base = OTHER; note = 2'-O-methyladenosine-3'-phosphate
tcagatggtgtctgctattga

SEQ ID NO: 685 - RNA, 21 nt, synthetic construct
  source 1..21: mol_type = other RNA
  modified_base 1: mod_base = OTHER; note = 2'-O-methyladenosine-3'-phosphorothioate
  modified_base 2: mod_base = OTHER; note = 2'-O-methylguanosine-3'-phosphorothioate
  modified_base 3: mod_base = OTHER; note = 2'-O-methyladenosine-3'-phosphate
  modified_base 4: mod_base = OTHER; note = 2'-O-methyluridine-3'-phosphate
  modified_base 5: mod_base = OTHER; note = 2'-O-methylguanosine-3'-phosphate
  modified_base 6: mod_base = OTHER; note = 2'-O-methylguanosine-3'-phosphate
  modified_base 7: mod_base = OTHER; note = 2'-fluorouridine-3'-phosphate
  modified_base 8: mod_base = OTHER; note = 2'-O-methylguanosine-3'-phosphate
  modified_base 9: mod_base = OTHER; note = 2'-fluorouridine-3'-phosphate
  modified_base 10: mod_base = OTHER; note = 2'-fluorocytidine-3'-phosphate
  modified_base 11: mod_base = OTHER; note = 2'-fluorouridine-3'-phosphate
  modified_base 12: mod_base = OTHER; note = 2'-O-methylguanosine-3'-phosphate
  modified_base 13: mod_base = OTHER; note = 2'-O-methylcytidine-3'-phosphate
  modified_base 14: mod_base = OTHER; note = 2'-O-methyluridine-3'-phosphate
  modified_base 15: mod_base = OTHER; note = 2'-O-methyladenosine-3'-phosphate
  modified_base 16: mod_base = OTHER; note = 2'-O-methyluridine-3'-phosphate
  modified_base 17: mod_base = OTHER; note = 2'-O-methyluridine-3'-phosphate
  modified_base 18: mod_base = OTHER; note = 2'-O-methylguanosine-3'-phosphate
  modified_base 19: mod_base = OTHER; note = 2'-O-methyluridine-3'-phosphorothioate
  modified_base 20: mod_base = OTHER; note = 2'-O-methyladenosine-3'-phosphorothioate
  modified_base 21: mod_base = OTHER; note = 2'-O-methyladenosine-3'-phosphate
agatggtgtctgctattgtaa

SEQ ID NO: 686 - RNA, 21 nt, synthetic construct
  source 1..21: mol_type = other RNA
  modified_base 1: mod_base = OTHER; note = 2'-O-methyladenosine-3'-phosphorothioate
  modified_base 2: mod_base = OTHER; note = 2'-O-methylguanosine-3'-phosphorothioate
  modified_base 3: mod_base = OTHER; note = 2'-O-methyladenosine-3'-phosphate
  modified_base 4: mod_base = OTHER; note = 2'-O-methyluridine-3'-phosphate
  modified_base 5: mod_base = OTHER; note = 2'-O-methylguanosine-3'-phosphate
  modified_base 6: mod_base = OTHER; note = 2'-O-methylguanosine-3'-phosphate
  modified_base 7: mod_base = OTHER; note = 2'-O-methyluridine-3'-phosphate
  modified_base 8: mod_base = OTHER; note = 2'-O-methylguanosine-3'-phosphate
  modified_base 9: mod_base = OTHER; note = 2'-fluorouridine-3'-phosphate
  modified_base 10: mod_base = OTHER; note = 2'-fluorocytidine-3'-phosphate
  modified_base 11: mod_base = OTHER; note = 2'-fluorouridine-3'-phosphate
  modified_base 12: mod_base = OTHER; note = 2'-O-methylguanosine-3'-phosphate
  modified_base 13: mod_base = OTHER; note = 2'-O-methylcytidine-3'-phosphate
  modified_base 14: mod_base = OTHER; note = 2'-O-methyluridine-3'-phosphate
  modified_base 15: mod_base = OTHER; note = 2'-O-methyladenosine-3'-phosphate
  modified_base 16: mod_base = OTHER; note = 2'-O-methyluridine-3'-phosphate
  modified_base 17: mod_base = OTHER; note = 2'-O-methyluridine-3'-phosphate
  modified_base 18: mod_base = OTHER; note = 2'-O-methylguanosine-3'-phosphate
  modified_base 19: mod_base = OTHER; note = 2'-O-methyluridine-3'-phosphorothioate
  modified_base 20: mod_base = OTHER; note = 2'-O-methyladenosine-3'-phosphorothioate
  modified_base 21: mod_base = OTHER; note = 2'-O-methyladenosine-3'-phosphate
agatggtgtctgctattgtaa

SEQ ID NO: 687 - RNA, 21 nt, synthetic construct
  source 1..21: mol_type = other RNA
  modified_base 1: mod_base = OTHER; note = 2'-O-methyladenosine-3'-phosphorothioate
  modified_base 2: mod_base = OTHER; note = 2'-O-methylcytidine-3'-phosphorothioate
  modified_base 3: mod_base = OTHER; note = 2'-O-methylguanosine-3'-phosphate
  modified_base 4: mod_base = OTHER; note = 2'-O-methyluridine-3'-phosphate
  modified_base 5: mod_base = OTHER; note = 2'-O-methyladenosine-3'-phosphate
  modified_base 6: mod_base = OTHER; note = 2'-O-methylcytidine-3'-phosphate
  modified_base 7: mod_base = OTHER; note = 2'-fluorocytidine-3'-phosphate
  modified_base 8: mod_base = OTHER; note = 2'-O-methyladenosine-3'-phosphate
  modified_base 9: mod_base = OTHER; note = 2'-fluorouridine-3'-phosphate
  modified_base 10: mod_base = OTHER; note = 2'-fluoroguanosine-3'-phosphate
  modified_base 11: mod_base = OTHER; note = 2'-fluorocytidine-3'-phosphate
  modified_base 12: mod_base = OTHER; note = 2'-O-methyladenosine-3'-phosphate
  modified_base 13: mod_base = OTHER; note = 2'-O-methylguanosine-3'-phosphate
  modified_base 14: mod_base = OTHER; note = 2'-O-methyladenosine-3'-phosphate
  modified_base 15: mod_base = OTHER; note = 2'-O-methyladenosine-3'-phosphate
  modified_base 16: mod_base = OTHER; note = 2'-O-methyluridine-3'-phosphate
  modified_base 17: mod_base = OTHER; note = 2'-O-methyladenosine-3'-phosphate
  modified_base 18: mod_base = OTHER; note = 2'-O-methylcytidine-3'-phosphate
  modified_base 19: mod_base = OTHER; note = 2'-O-methyladenosine-3'-phosphorothioate
  modified_base 20: mod_base = OTHER; note = 2'-O-methyladenosine-3'-phosphorothioate
  modified_base 21: mod_base = OTHER; note = 2'-O-methyladenosine-3'-phosphate
acgtaccatgcagaatacaaa

SEQ ID NO: 688 - RNA, 21 nt, synthetic construct
  source 1..21: mol_type = other RNA
  modified_base 1: mod_base = OTHER; note = 2'-O-methyladenosine-3'-phosphorothioate
  modified_base 2: mod_base = OTHER; note = 2'-O-methylcytidine-3'-phosphorothioate
  modified_base 3: mod_base = OTHER; note = 2'-O-methylguanosine-3'-phosphate
  modified_base 4: mod_base = OTHER; note = 2'-O-methyluridine-3'-phosphate
  modified_base 5: mod_base = OTHER; note = 2'-O-methyladenosine-3'-phosphate
  modified_base 6: mod_base = OTHER; note = 2'-O-methylcytidine-3'-phosphate
  modified_base 7: mod_base = OTHER; note = 2'-O-methylcytidine-3'-phosphate
  modified_base 8: mod_base = OTHER; note = 2'-O-methyladenosine-3'-phosphate
  modified_base 9: mod_base = OTHER; note = 2'-fluorouridine-3'-phosphate
  modified_base 10: mod_base = OTHER; note = 2'-fluoroguanosine-3'-phosphate
  modified_base 11: mod_base = OTHER; note = 2'-fluorocytidine-3'-phosphate
  modified_base 12: mod_base = OTHER; note = 2'-O-methyladenosine-3'-phosphate
  modified_base 13: mod_base = OTHER; note = 2'-O-methylguanosine-3'-phosphate
  modified_base 14: mod_base = OTHER; note = 2'-O-methyladenosine-3'-phosphate
  modified_base 15: mod_base = OTHER; note = 2'-O-methyladenosine-3'-phosphate
  modified_base 16: mod_base = OTHER; note = 2'-O-methyluridine-3'-phosphate
  modified_base 17: mod_base = OTHER; note = 2'-O-methyladenosine-3'-phosphate
  modified_base 18: mod_base = OTHER; note = 2'-O-methylcytidine-3'-phosphate
  modified_base 19: mod_base = OTHER; note = 2'-O-methyladenosine-3'-phosphorothioate
  modified_base 20: mod_base = OTHER; note = 2'-O-methyladenosine-3'-phosphorothioate
  modified_base 21: mod_base = OTHER; note = 2'-O-methyladenosine-3'-phosphate
acgtaccatgcagaatacaaa

SEQ ID NO: 689 - RNA, 21 nt, synthetic construct
  source 1..21: mol_type = other RNA
  modified_base 1: mod_base = OTHER; note = 2'-O-methylcytidine-3'-phosphorothioate
  modified_base 2: mod_base = OTHER; note = 2'-O-methylguanosine-3'-phosphorothioate
  modified_base 3: mod_base = OTHER; note = 2'-O-methyluridine-3'-phosphate
  modified_base 4: mod_base = OTHER; note = 2'-O-methyladenosine-3'-phosphate
  modified_base 5: mod_base = OTHER; note = 2'-O-methylcytidine-3'-phosphate
  modified_base 6: mod_base = OTHER; note = 2'-O-methylcytidine-3'-phosphate
  modified_base 7: mod_base = OTHER; note = 2'-fluoroadenosine-3'-phosphate
  modified_base 8: mod_base = OTHER; note = 2'-O-methyluridine-3'-phosphate
  modified_base 9: mod_base = OTHER; note = 2'-fluoroguanosine-3'-phosphate
  modified_base 10: mod_base = OTHER; note = 2'-fluorocytidine-3'-phosphate
  modified_base 11: mod_base = OTHER; note = 2'-fluoroadenosine-3'-phosphate
  modified_base 12: mod_base = OTHER; note = 2'-O-methylguanosine-3'-phosphate
  modified_base 13: mod_base = OTHER; note = 2'-O-methyladenosine-3'-phosphate
  modified_base 14: mod_base = OTHER; note = 2'-O-methyladenosine-3'-phosphate
  modified_base 15: mod_base = OTHER; note = 2'-O-methyluridine-3'-phosphate
  modified_base 16: mod_base = OTHER; note = 2'-O-methyladenosine-3'-phosphate
  modified_base 17: mod_base = OTHER; note = 2'-O-methylcytidine-3'-phosphate
  modified_base 18: mod_base = OTHER; note = 2'-O-methyladenosine-3'-phosphate
  modified_base 19: mod_base = OTHER; note = 2'-O-methyladenosine-3'-phosphorothioate
  modified_base 20: mod_base = OTHER; note = 2'-O-methyladenosine-3'-phosphorothioate
  modified_base 21: mod_base = OTHER; note = 2'-O-methyladenosine-3'-phosphate
cgtaccatgcagaatacaaaa

SEQ ID NO: 690 - RNA, 21 nt, synthetic construct
  source 1..21: mol_type = other RNA
  modified_base 1: mod_base = OTHER; note = 2'-O-methylguanosine-3'-phosphorothioate
  modified_base 2: mod_base = OTHER; note = 2'-O-methyluridine-3'-phosphorothioate
  modified_base 3: mod_base = OTHER; note = 2'-O-methyladenosine-3'-phosphate
  modified_base 4: mod_base = OTHER; note = 2'-O-methylcytidine-3'-phosphate
  modified_base 5: mod_base = OTHER; note = 2'-O-methylcytidine-3'-phosphate
  modified_base 6: mod_base = OTHER; note = 2'-O-methyladenosine-3'-phosphate
  modified_base 7: mod_base = OTHER; note = 2'-fluorouridine-3'-phosphate
  modified_base 8: mod_base = OTHER; note = 2'-O-methylguanosine-3'-phosphate
  modified_base 9: mod_base = OTHER; note = 2'-fluorocytidine-3'-phosphate
  modified_base 10: mod_base = OTHER; note = 2'-fluoroadenosine-3'-phosphate
  modified_base 11: mod_base = OTHER; note = 2'-fluoroguanosine-3'-phosphate
  modified_base 12: mod_base = OTHER; note = 2'-O-methyladenosine-3'-phosphate
  modified_base 13: mod_base = OTHER; note = 2'-O-methyladenosine-3'-phosphate
  modified_base 14: mod_base = OTHER; note = 2'-O-methyluridine-3'-phosphate
  modified_base 15: mod_base = OTHER; note = 2'-O-methyladenosine-3'-phosphate
  modified_base 16: mod_base = OTHER; note = 2'-O-methylcytidine-3'-phosphate
  modified_base 17: mod_base = OTHER; note = 2'-O-methyladenosine-3'-phosphate
  modified_base 18: mod_base = OTHER; note = 2'-O-methyladenosine-3'-phosphate
  modified_base 19: mod_base = OTHER; note = 2'-O-methyladenosine-3'-phosphorothioate
  modified_base 20: mod_base = OTHER; note = 2'-O-methyluridine-3'-phosphorothioate
  modified_base 21: mod_base = OTHER; note = 2'-O-methyladenosine-3'-phosphate
gtaccatgcagaatacaaata

SEQ ID NO: 691 - RNA, 21 nt, synthetic construct
  source 1..21: mol_type = other RNA
  modified_base 1: mod_base = OTHER; note = 2'-O-methyluridine-3'-phosphorothioate
  modified_base 2: mod_base = OTHER; note = 2'-O-methyladenosine-3'-phosphorothioate
  modified_base 3: mod_base = OTHER; note = 2'-O-methylcytidine-3'-phosphate
  modified_base 4: mod_base = OTHER; note = 2'-O-methylcytidine-3'-phosphate
  modified_base 5: mod_base = OTHER; note = 2'-O-methyladenosine-3'-phosphate
  modified_base 6: mod_base = OTHER; note = 2'-O-methyluridine-3'-phosphate
  modified_base 7: mod_base = OTHER; note = 2'-O-methylguanosine-3'-phosphate
  modified_base 8: mod_base = OTHER; note = 2'-O-methylcytidine-3'-phosphate
  modified_base 9: mod_base = OTHER; note = 2'-fluoroadenosine-3'-phosphate
  modified_base 10: mod_base = OTHER; note = 2'-fluoroguanosine-3'-phosphate
  modified_base 11: mod_base = OTHER; note = 2'-fluoroadenosine-3'-phosphate
  modified_base 12: mod_base = OTHER; note = 2'-O-methyladenosine-3'-phosphate
  modified_base 13: mod_base = OTHER; note = 2'-O-methyluridine-3'-phosphate
  modified_base 14: mod_base = OTHER; note = 2'-O-methyladenosine-3'-phosphate
  modified_base 15: mod_base = OTHER; note = 2'-O-methylcytidine-3'-phosphate
  modified_base 16: mod_base = OTHER; note = 2'-O-methyladenosine-3'-phosphate
  modified_base 17: mod_base = OTHER; note = 2'-O-methyladenosine-3'-phosphate
  modified_base 18: mod_base = OTHER; note = 2'-O-methyladenosine-3'-phosphate
  modified_base 19: mod_base = OTHER; note = 2'-O-methyluridine-3'-phosphorothioate
  modified_base 20: mod_base = OTHER; note = 2'-O-methylguanosine-3'-phosphorothioate
  modified_base 21: mod_base = OTHER; note = 2'-O-methyladenosine-3'-phosphate
taccatgcagaatacaaatga

SEQ ID NO: 692 - RNA, 21 nt, synthetic construct
  source 1..21: mol_type = other RNA
  modified_base 1: mod_base = OTHER; note = 2'-O-methyladenosine-3'-phosphorothioate
  modified_base 2: mod_base = OTHER; note = 2'-O-methylcytidine-3'-phosphorothioate
  modified_base 3: mod_base = OTHER; note = 2'-O-methylcytidine-3'-phosphate
  modified_base 4: mod_base = OTHER; note = 2'-O-methyladenosine-3'-phosphate
  modified_base 5: mod_base = OTHER; note = 2'-O-methyluridine-3'-phosphate
  modified_base 6: mod_base = OTHER; note = 2'-O-methylguanosine-3'-phosphate
  modified_base 7: mod_base = OTHER; note = 2'-O-methylcytidine-3'-phosphate
  modified_base 8: mod_base = OTHER; note = 2'-O-methyladenosine-3'-phosphate
  modified_base 9: mod_base = OTHER; note = 2'-fluoroguanosine-3'-phosphate
  modified_base 10: mod_base = OTHER; note = 2'-fluoroadenosine-3'-phosphate
  modified_base 11: mod_base = OTHER; note = 2'-fluoroadenosine-3'-phosphate
  modified_base 12: mod_base = OTHER; note = 2'-O-methyluridine-3'-phosphate
  modified_base 13: mod_base = OTHER; note = 2'-O-methyladenosine-3'-phosphate
  modified_base 14: mod_base = OTHER; note = 2'-O-methylcytidine-3'-phosphate
  modified_base 15: mod_base = OTHER; note = 2'-O-methyladenosine-3'-phosphate
  modified_base 16: mod_base = OTHER; note = 2'-O-methyladenosine-3'-phosphate
  modified_base 17: mod_base = OTHER; note = 2'-O-methyladenosine-3'-phosphate
  modified_base 18: mod_base = OTHER; note = 2'-O-methyluridine-3'-phosphate
  modified_base 19: mod_base = OTHER; note = 2'-O-methylguanosine-3'-phosphorothioate
  modified_base 20: mod_base = OTHER; note = 2'-O-methyladenosine-3'-phosphorothioate
  modified_base 21: mod_base = OTHER; note = 2'-O-methyladenosine-3'-phosphate
accatgcagaatacaaatgaa

SEQ ID NO: 693 - RNA, 21 nt, synthetic construct
  source 1..21: mol_type = other RNA
  modified_base 1: mod_base = OTHER; note = 2'-O-methylcytidine-3'-phosphorothioate
  modified_base 2: mod_base = OTHER; note = 2'-O-methylcytidine-3'-phosphorothioate
  modified_base 3: mod_base = OTHER; note = 2'-O-methyladenosine-3'-phosphate
  modified_base 4: mod_base = OTHER; note = 2'-O-methyluridine-3'-phosphate
  modified_base 5: mod_base = OTHER; note = 2'-O-methylguanosine-3'-phosphate
  modified_base 6: mod_base = OTHER; note = 2'-O-methylcytidine-3'-phosphate
  modified_base 7: mod_base = OTHER; note = 2'-O-methyladenosine-3'-phosphate
  modified_base 8: mod_base = OTHER; note = 2'-O-methylguanosine-3'-phosphate
  modified_base 9: mod_base = OTHER; note = 2'-fluoroadenosine-3'-phosphate
  modified_base 10: mod_base = OTHER; note = 2'-fluoroadenosine-3'-phosphate
  modified_base 11: mod_base = OTHER; note = 2'-fluorouridine-3'-phosphate
  modified_base 12: mod_base = OTHER; note = 2'-O-methyladenosine-3'-phosphate
  modified_base 13: mod_base = OTHER; note = 2'-O-methylcytidine-3'-phosphate
  modified_base 14: mod_base = OTHER; note = 2'-O-methyladenosine-3'-phosphate
  modified_base 15: mod_base = OTHER; note = 2'-O-methyladenosine-3'-phosphate
  modified_base 16: mod_base = OTHER; note = 2'-O-methyladenosine-3'-phosphate
  modified_base 17: mod_base = OTHER; note = 2'-O-methyluridine-3'-phosphate
  modified_base 18: mod_base = OTHER; note = 2'-O-methylguanosine-3'-phosphate
  modified_base 19: mod_base = OTHER; note = 2'-O-methyladenosine-3'-phosphorothioate
  modified_base 20: mod_base = OTHER; note = 2'-O-methyluridine-3'-phosphorothioate
  modified_base 21: mod_base = OTHER; note = 2'-O-methyladenosine-3'-phosphate
ccatgcagaatacaaatgata

SEQ ID NO: 694 - RNA, 21 nt, synthetic construct
  source 1..21: mol_type = other RNA
  modified_base 1: mod_base = OTHER; note = 2'-O-methylcytidine-3'-phosphorothioate
  modified_base 2: mod_base = OTHER; note = 2'-O-methyladenosine-3'-phosphorothioate
  modified_base 3: mod_base = OTHER; note = 2'-O-methyluridine-3'-phosphate
  modified_base 4: mod_base = OTHER; note = 2'-O-methylguanosine-3'-phosphate
  modified_base 5: mod_base = OTHER; note = 2'-O-methylcytidine-3'-phosphate
  modified_base 6: mod_base = OTHER; note = 2'-O-methyladenosine-3'-phosphate
  modified_base 7: mod_base = OTHER; note = 2'-O-methylguanosine-3'-phosphate
  modified_base 8: mod_base = OTHER; note = 2'-O-methyladenosine-3'-phosphate
  modified_base 9: mod_base = OTHER; note = 2'-fluoroadenosine-3'-phosphate
  modified_base 10: mod_base = OTHER; note = 2'-fluorouridine-3'-phosphate
  modified_base 11: mod_base = OTHER; note = 2'-fluoroadenosine-3'-phosphate
  modified_base 12: mod_base = OTHER; note = 2'-O-methylcytidine-3'-phosphate
  modified_base 13: mod_base = OTHER; note = 2'-O-methyladenosine-3'-phosphate
  modified_base 14: mod_base = OTHER; note = 2'-O-methyladenosine-3'-phosphate
  modified_base 15: mod_base = OTHER; note = 2'-O-methyladenosine-3'-phosphate
  modified_base 16: mod_base = OTHER; note = 2'-O-methyluridine-3'-phosphate
  modified_base 17: mod_base = OTHER; note = 2'-O-methylguanosine-3'-phosphate
  modified_base 18: mod_base = OTHER; note = 2'-O-methyladenosine-3'-phosphate
  modified_base 19: mod_base = OTHER; note = 2'-O-methyluridine-3'-phosphorothioate
  modified_base 20: mod_base = OTHER; note = 2'-O-methylguanosine-3'-phosphorothioate
  modified_base 21: mod_base = OTHER; note = 2'-O-methyladenosine-3'-phosphate
catgcagaatacaaatgatga

SEQ ID NO: 695 - RNA, 21 nt, synthetic construct
  source 1..21: mol_type = other RNA
  modified_base 1: mod_base = OTHER; note = 2'-O-methyladenosine-3'-phosphorothioate
  modified_base 2: mod_base = OTHER; note = 2'-O-methyluridine-3'-phosphorothioate
  modified_base 3: mod_base = OTHER; note = 2'-O-methylguanosine-3'-phosphate
  modified_base 4: mod_base = OTHER; note = 2'-O-methylcytidine-3'-phosphate
  modified_base 5: mod_base = OTHER; note = 2'-O-methyladenosine-3'-phosphate
  modified_base 6: mod_base = OTHER; note = 2'-O-methylguanosine-3'-phosphate
  modified_base 7: mod_base = OTHER; note = 2'-fluoroadenosine-3'-phosphate
  modified_base 8: mod_base = OTHER; note = 2'-O-methyladenosine-3'-phosphate
  modified_base 9: mod_base = OTHER; note = 2'-fluorouridine-3'-phosphate
  modified_base 10: mod_base = OTHER; note = 2'-fluoroadenosine-3'-phosphate
  modified_base 11: mod_base = OTHER; note = 2'-fluorocytidine-3'-phosphate
  modified_base 12: mod_base = OTHER; note = 2'-O-methyladenosine-3'-phosphate
  modified_base 13: mod_base = OTHER; note = 2'-O-methyladenosine-3'-phosphate
  modified_base 14: mod_base = OTHER; note = 2'-O-methyladenosine-3'-phosphate
  modified_base 15: mod_base = OTHER; note = 2'-O-methyluridine-3'-phosphate
  modified_base 16: mod_base = OTHER; note = 2'-O-methylguanosine-3'-phosphate
  modified_base 17: mod_base = OTHER; note = 2'-O-methyladenosine-3'-phosphate
  modified_base 18: mod_base = OTHER; note = 2'-O-methyluridine-3'-phosphate
  modified_base 19: mod_base = OTHER; note = 2'-O-methylguanosine-3'-phosphorothioate
  modified_base 20: mod_base = OTHER; note = 2'-O-methyluridine-3'-phosphorothioate
  modified_base 21: mod_base = OTHER; note = 2'-O-methyladenosine-3'-phosphate
atgcagaatacaaatgatgta

SEQ ID NO: 696 - RNA, 21 nt, synthetic construct
  source 1..21: mol_type = other RNA
  modified_base 1: mod_base = OTHER; note = 2'-O-methylguanosine-3'-phosphorothioate
  modified_base 2: mod_base = OTHER; note = 2'-O-methylcytidine-3'-phosphorothioate
  modified_base 3: mod_base = OTHER; note = 2'-O-methyladenosine-3'-phosphate
  modified_base 4: mod_base = OTHER; note = 2'-O-methylguanosine-3'-phosphate
  modified_base 5: mod_base = OTHER; note = 2'-O-methyladenosine-3'-phosphate
  modified_base 6: mod_base = OTHER; note = 2'-O-methyladenosine-3'-phosphate
  modified_base 7: mod_base = OTHER; note = 2'-O-methyluridine-3'-phosphate
  modified_base 8: mod_base = OTHER; note = 2'-O-methyladenosine-3'-phosphate
  modified_base 9: mod_base = OTHER; note = 2'-fluorocytidine-3'-phosphate
  modified_base 10: mod_base = OTHER; note = 2'-fluoroadenosine-3'-phosphate
  modified_base 11: mod_base = OTHER; note = 2'-fluoroadenosine-3'-phosphate
  modified_base 12: mod_base = OTHER; note = 2'-O-methyladenosine-3'-phosphate
  modified_base 13: mod_base = OTHER; note = 2'-O-methyluridine-3'-phosphate
  modified_base 14: mod_base = OTHER; note = 2'-O-methylguanosine-3'-phosphate
  modified_base 15: mod_base = OTHER; note = 2'-O-methyladenosine-3'-phosphate
  modified_base 16: mod_base = OTHER; note = 2'-O-methyluridine-3'-phosphate
  modified_base 17: mod_base = OTHER; note = 2'-O-methylguanosine-3'-phosphate
  modified_base 18: mod_base = OTHER; note = 2'-O-methyluridine-3'-phosphate
  modified_base 19: mod_base = OTHER; note = 2'-O-methyladenosine-3'-phosphorothioate
  modified_base 20: mod_base = OTHER; note = 2'-O-methylguanosine-3'-phosphorothioate
  modified_base 21: mod_base = OTHER; note = 2'-O-methyladenosine-3'-phosphate
gcagaatacaaatgatgtaga

SEQ ID NO: 697 - RNA, 21 nt, synthetic construct
  source 1..21: mol_type = other RNA
  modified_base 1: mod_base = OTHER; note = 2'-O-methylcytidine-3'-phosphorothioate
  modified_base 2: mod_base = OTHER; note = 2'-O-methyladenosine-3'-phosphorothioate
  modified_base 3: mod_base = OTHER; note = 2'-O-methylguanosine-3'-phosphate
  modified_base 4: mod_base = OTHER; note = 2'-O-methyladenosine-3'-phosphate
  modified_base 5: mod_base = OTHER; note = 2'-O-methyladenosine-3'-phosphate
  modified_base 6: mod_base = OTHER; note = 2'-O-methyluridine-3'-phosphate
  modified_base 7: mod_base = OTHER; note = 2'-fluoroadenosine-3'-phosphate
  modified_base 8: mod_base = OTHER; note = 2'-O-methylcytidine-3'-phosphate
  modified_base 9: mod_base = OTHER; note = 2'-fluoroadenosine-3'-phosphate
  modified_base 10: mod_base = OTHER; note = 2'-fluoroadenosine-3'-phosphate
  modified_base 11: mod_base = OTHER; note = 2'-fluoroadenosine-3'-phosphate
  modified_base 12: mod_base = OTHER; note = 2'-O-methyluridine-3'-phosphate
  modified_base 13: mod_base = OTHER; note = 2'-O-methylguanosine-3'-phosphate
  modified_base 14: mod_base = OTHER; note = 2'-O-methyladenosine-3'-phosphate
  modified_base 15: mod_base = OTHER; note = 2'-O-methyluridine-3'-phosphate
  modified_base 16: mod_base = OTHER; note = 2'-O-methylguanosine-3'-phosphate
  modified_base 17: mod_base = OTHER; note = 2'-O-methyluridine-3'-phosphate
  modified_base 18: mod_base = OTHER; note = 2'-O-methyladenosine-3'-phosphate
  modified_base 19: mod_base = OTHER; note = 2'-O-methylguanosine-3'-phosphorothioate
  modified_base 20: mod_base = OTHER; note = 2'-O-methyladenosine-3'-phosphorothioate
  modified_base 21: mod_base = OTHER; note = 2'-O-methyladenosine-3'-phosphate
cagaatacaaatgatgtagaa

SEQ ID NO: 698 - RNA, 21 nt, synthetic construct
  source 1..21: mol_type = other RNA
  modified_base 1: mod_base = OTHER; note = 2'-O-methyluridine-3'-phosphorothioate
  modified_base 2: mod_base = OTHER; note = 2'-O-methylguanosine-3'-phosphorothioate
  modified_base 3: mod_base = OTHER; note = 2'-O-methyladenosine-3'-phosphate
  modified_base 4: mod_base = OTHER; note = 2'-O-methyluridine-3'-phosphate
  modified_base 5: mod_base = OTHER; note = 2'-O-methylguanosine-3'-phosphate
  modified_base 6: mod_base = OTHER; note = 2'-O-methyluridine-3'-phosphate
  modified_base 7: mod_base = OTHER; note = 2'-O-methyladenosine-3'-phosphate
  modified_base 8: mod_base = OTHER; note = 2'-O-methylguanosine-3'-phosphate
  modified_base 9: mod_base = OTHER; note = 2'-fluoroadenosine-3'-phosphate
  modified_base 10: mod_base = OTHER; note = 2'-fluoroadenosine-3'-phosphate
  modified_base 11: mod_base = OTHER; note = 2'-fluoroadenosine-3'-phosphate
  modified_base 12: mod_base = OTHER; note = 2'-O-methylcytidine-3'-phosphate
  modified_base 13: mod_base = OTHER; note = 2'-O-methyladenosine-3'-phosphate
  modified_base 14: mod_base = OTHER; note = 2'-O-methylguanosine-3'-phosphate
  modified_base 15: mod_base = OTHER; note = 2'-O-methylcytidine-3'-phosphate
  modified_base 16: mod_base = OTHER; note = 2'-O-methyluridine-3'-phosphate
  modified_base 17: mod_base = OTHER; note = 2'-O-methylcytidine-3'-phosphate
  modified_base 18: mod_base = OTHER; note = 2'-O-methylguanosine-3'-phosphate
  modified_base 19: mod_base = OTHER; note = 2'-O-methyluridine-3'-phosphorothioate
  modified_base 20: mod_base = OTHER; note = 2'-O-methyluridine-3'-phosphorothioate
  modified_base 21: mod_base = OTHER; note = 2'-O-methyladenosine-3'-phosphate
tgatgtagaaacagctcgtta

SEQ ID NO: 699 - RNA, 21 nt, synthetic construct
  source 1..21: mol_type = other RNA
  modified_base 1: mod_base = OTHER; note = 2'-O-methylguanosine-3'-phosphorothioate
  modified_base 2: mod_base = OTHER; note = 2'-O-methyladenosine-3'-phosphorothioate
  modified_base 3: mod_base = OTHER; note = 2'-O-methyluridine-3'-phosphate
  modified_base 4: mod_base = OTHER; note = 2'-O-methylguanosine-3'-phosphate
  modified_base 5: mod_base = OTHER; note = 2'-O-methyluridine-3'-phosphate
  modified_base 6: mod_base = OTHER; note = 2'-O-methyladenosine-3'-phosphate
  modified_base 7: mod_base = OTHER; note = 2'-O-methylguanosine-3'-phosphate
  modified_base 8: mod_base = OTHER; note = 2'-O-methyladenosine-3'-phosphate
  modified_base 9: mod_base = OTHER; note = 2'-fluoroadenosine-3'-phosphate
  modified_base 10: mod_base = OTHER; note = 2'-fluoroadenosine-3'-phosphate
  modified_base 11: mod_base = OTHER; note = 2'-fluorocytidine-3'-phosphate
  modified_base 12: mod_base = OTHER; note = 2'-O-methyladenosine-3'-phosphate
  modified_base 13: mod_base = OTHER; note = 2'-O-methylguanosine-3'-phosphate
  modified_base 14: mod_base = OTHER; note = 2'-O-methylcytidine-3'-phosphate
  modified_base 15: mod_base = OTHER; note = 2'-O-methyluridine-3'-phosphate
  modified_base 16: mod_base = OTHER; note = 2'-O-methylcytidine-3'-phosphate
  modified_base 17: mod_base = OTHER; note = 2'-O-methylguanosine-3'-phosphate
  modified_base 18: mod_base = OTHER; note = 2'-O-methyluridine-3'-phosphate
  modified_base 19: mod_base = OTHER; note = 2'-O-methyluridine-3'-phosphorothioate
  modified_base 20: mod_base = OTHER; note = 2'-O-methylguanosine-3'-phosphorothioate
  modified_base 21: mod_base = OTHER; note = 2'-O-methyladenosine-3'-phosphate
gatgtagaaacagctcgttga

SEQ ID NO: 700 - RNA, 21 nt, synthetic construct
  source 1..21: mol_type = other RNA
  modified_base 1: mod_base = OTHER; note = 2'-O-methyladenosine-3'-phosphorothioate
  modified_base 2: mod_base = OTHER; note = 2'-O-methylcytidine-3'-phosphorothioate
  modified_base 3: mod_base = OTHER; note = 2'-O-methyluridine-3'-phosphate
  modified_base 4: mod_base = OTHER; note = 2'-O-methylguanosine-3'-phosphate
  modified_base 5: mod_base = OTHER; note = 2'-O-methylguanosine-3'-phosphate
  modified_base 6: mod_base = OTHER; note = 2'-O-methylcytidine-3'-phosphate
  modified_base 7: mod_base = OTHER; note = 2'-O-methylcytidine-3'-phosphate
  modified_base 8: mod_base = OTHER; note = 2'-O-methyladenosine-3'-phosphate
  modified_base 9: mod_base = OTHER; note = 2'-fluorouridine-3'-phosphate
  modified_base 10: mod_base = OTHER; note = 2'-fluorocytidine-3'-phosphate
  modified_base 11: mod_base = OTHER; note = 2'-fluorouridine-3'-phosphate
  modified_base 12: mod_base = OTHER; note = 2'-O-methyluridine-3'-phosphate
  modified_base 13: mod_base = OTHER; note = 2'-O-methyluridine-3'-phosphate
  modified_base 14: mod_base = OTHER; note = 2'-O-methyladenosine-3'-phosphate
  modified_base 15: mod_base = OTHER; note = 2'-O-methyladenosine-3'-phosphate
  modified_base 16: mod_base = OTHER; note = 2'-O-methylguanosine-3'-phosphate
  modified_base 17: mod_base = OTHER; note = 2'-O-methyluridine-3'-phosphate
  modified_base 18: mod_base = OTHER; note = 2'-O-methylcytidine-3'-phosphate
  modified_base 19: mod_base = OTHER; note = 2'-O-methyluridine-3'-phosphorothioate
  modified_base 20: mod_base = OTHER; note = 2'-O-methylguanosine-3'-phosphorothioate
  modified_base 21: mod_base = OTHER; note = 2'-O-methyladenosine-3'-phosphate
actggccatctttaagtctga

SEQ ID NO: 701 - RNA, 21 nt, synthetic construct
  source 1..21: mol_type = other RNA
  modified_base 1: mod_base = OTHER; note = 2'-O-methylcytidine-3'-phosphorothioate
  modified_base 2: mod_base = OTHER; note = 2'-O-methyluridine-3'-phosphorothioate
  modified_base 3: mod_base = OTHER; note = 2'-O-methylguanosine-3'-phosphate
  modified_base 4: mod_base = OTHER; note = 2'-O-methylguanosine-3'-phosphate
  modified_base 5: mod_base = OTHER; note = 2'-O-methylcytidine-3'-phosphate
  modified_base 6: mod_base = OTHER; note = 2'-O-methylcytidine-3'-phosphate
  modified_base 7: mod_base = OTHER; note = 2'-O-methyladenosine-3'-phosphate
  modified_base 8: mod_base = OTHER; note = 2'-O-methyluridine-3'-phosphate
  modified_base 9: mod_base = OTHER; note = 2'-fluorocytidine-3'-phosphate
  modified_base 10: mod_base = OTHER; note = 2'-fluorouridine-3'-phosphate
  modified_base 11: mod_base = OTHER; note = 2'-fluorouridine-3'-phosphate
  modified_base 12: mod_base = OTHER; note = 2'-O-methyluridine-3'-phosphate
  modified_base 13: mod_base = OTHER; note = 2'-O-methyladenosine-3'-phosphate
  modified_base 14: mod_base = OTHER; note = 2'-O-methyladenosine-3'-phosphate
  modified_base 15: mod_base = OTHER; note = 2'-O-methylguanosine-3'-phosphate
  modified_base 16: mod_base = OTHER; note = 2'-O-methyluridine-3'-phosphate
  modified_base 17: mod_base = OTHER; note = 2'-O-methylcytidine-3'-phosphate
  modified_base 18: mod_base = OTHER; note = 2'-O-methyluridine-3'-phosphate
  modified_base 19: mod_base = OTHER; note = 2'-O-methylguanosine-3'-phosphorothioate
  modified_base 20: mod_base = OTHER; note = 2'-O-methylguanosine-3'-phosphorothioate
  modified_base 21: mod_base = OTHER; note = 2'-O-methyladenosine-3'-phosphate
ctggccatctttaagtctgga

SEQ ID NO: 702 - RNA, 21 nt, synthetic construct
  source 1..21: mol_type = other RNA
  modified_base 1: mod_base = OTHER; note = 2'-O-methyluridine-3'-phosphorothioate
  modified_base 2: mod_base = OTHER; note = 2'-O-methylguanosine-3'-phosphorothioate
  modified_base 3: mod_base = OTHER; note = 2'-O-methylguanosine-3'-phosphate
  modified_base 4: mod_base = OTHER; note = 2'-O-methylcytidine-3'-phosphate
  modified_base 5: mod_base = OTHER; note = 2'-O-methylcytidine-3'-phosphate
  modified_base 6: mod_base = OTHER; note = 2'-O-methyladenosine-3'-phosphate
  modified_base 7: mod_base = OTHER; note = 2'-fluorouridine-3'-phosphate
  modified_base 8: mod_base = OTHER; note = 2'-O-methylcytidine-3'-phosphate
  modified_base 9: mod_base = OTHER; note = 2'-fluorouridine-3'-phosphate
  modified_base 10: mod_base = OTHER; note = 2'-fluorouridine-3'-phosphate
  modified_base 11: mod_base = OTHER; note = 2'-fluorouridine-3'-phosphate
  modified_base 12: mod_base = OTHER; note = 2'-O-methyladenosine-3'-phosphate
  modified_base 13: mod_base = OTHER; note = 2'-O-methyladenosine-3'-phosphate
  modified_base 14: mod_base = OTHER; note = 2'-O-methylguanosine-3'-phosphate
  modified_base 15: mod_base = OTHER; note = 2'-O-methyluridine-3'-phosphate
  modified_base 16: mod_base = OTHER; note = 2'-O-methylcytidine-3'-phosphate
  modified_base 17: mod_base = OTHER; note = 2'-O-methyluridine-3'-phosphate
  modified_base 18: mod_base = OTHER; note = 2'-O-methylguanosine-3'-phosphate
  modified_base 19: mod_base = OTHER; note = 2'-O-methylguanosine-3'-phosphorothioate
  modified_base 20: mod_base = OTHER; note = 2'-O-methyladenosine-3'-phosphorothioate
  modified_base 21: mod_base = OTHER; note = 2'-O-methyladenosine-3'-phosphate
tggccatctttaagtctggaa

SEQ ID NO: 703 - RNA, 21 nt, synthetic construct
  source 1..21: mol_type = other RNA
  modified_base 1: mod_base = OTHER; note = 2'-O-methylguanosine-3'-phosphorothioate
  modified_base 2: mod_base = OTHER; note = 2'-O-methylguanosine-3'-phosphorothioate
  modified_base 3: mod_base = OTHER; note = 2'-O-methylcytidine-3'-phosphate
  modified_base 4: mod_base = OTHER; note = 2'-O-methylcytidine-3'-phosphate
  modified_base 5: mod_base = OTHER; note = 2'-O-methyladenosine-3'-phosphate
  modified_base 6: mod_base = OTHER; note = 2'-O-methyluridine-3'-phosphate
  modified_base 7: mod_base = OTHER; note = 2'-O-methylcytidine-3'-phosphate
  modified_base 8: mod_base = OTHER; note = 2'-O-methyluridine-3'-phosphate
  modified_base 9: mod_base = OTHER; note = 2'-fluorouridine-3'-phosphate
  modified_base 10: mod_base = OTHER; note = 2'-fluorouridine-3'-phosphate
  modified_base 11: mod_base = OTHER; note = 2'-fluoroadenosine-3'-phosphate
  modified_base 12: mod_base = OTHER; note = 2'-O-methyladenosine-3'-phosphate
  modified_base 13: mod_base = OTHER; note = 2'-O-methylguanosine-3'-phosphate
  modified_base 14: mod_base = OTHER; note = 2'-O-methyluridine-3'-phosphate
  modified_base 15: mod_base = OTHER; note = 2'-O-methylcytidine-3'-phosphate
  modified_base 16: mod_base = OTHER; note = 2'-O-methyluridine-3'-phosphate
  modified_base 17: mod_base = OTHER; note = 2'-O-methylguanosine-3'-phosphate
  modified_base 18: mod_base = OTHER; note = 2'-O-methylguanosine-3'-phosphate
  modified_base 19: mod_base = OTHER; note = 2'-O-methyladenosine-3'-phosphorothioate
  modified_base 20: mod_base = OTHER; note = 2'-O-methylguanosine-3'-phosphorothioate
  modified_base 21: mod_base = OTHER; note = 2'-O-methyladenosine-3'-phosphate
ggccatctttaagtctggaga

SEQ ID NO: 704 - RNA, 21 nt, synthetic construct
  source 1..21: mol_type = other RNA
  modified_base 1: mod_base = OTHER; note = 2'-O-methylguanosine-3'-phosphorothioate
  modified_base 2: mod_base = OTHER; note = 2'-O-methylcytidine-3'-phosphorothioate
  modified_base 3: mod_base = OTHER; note = 2'-O-methylcytidine-3'-phosphate
  modified_base 4: mod_base = OTHER; note = 2'-O-methyladenosine-3'-phosphate
  modified_base 5: mod_base = OTHER; note = 2'-O-methyluridine-3'-phosphate
  modified_base 6: mod_base = OTHER; note = 2'-O-methylcytidine-3'-phosphate
  modified_base 7: mod_base = OTHER; note = 2'-O-methyluridine-3'-phosphate
  modified_base 8: mod_base = OTHER; note = 2'-O-methyluridine-3'-phosphate
  modified_base 9: mod_base = OTHER; note = 2'-fluorouridine-3'-phosphate
  modified_base 10: mod_base = OTHER; note = 2'-fluoroadenosine-3'-phosphate
  modified_base 11: mod_base = OTHER; note = 2'-fluoroadenosine-3'-phosphate
  modified_base 12: mod_base = OTHER; note = 2'-O-methylguanosine-3'-phosphate
  modified_base 13: mod_base = OTHER; note = 2'-O-methyluridine-3'-phosphate
  modified_base 14: mod_base = OTHER; note = 2'-O-methylcytidine-3'-phosphate
  modified_base 15: mod_base = OTHER; note = 2'-O-methyluridine-3'-phosphate
  modified_base 16: mod_base = OTHER; note = 2'-O-methylguanosine-3'-phosphate
  modified_base 17: mod_base = OTHER; note = 2'-O-methylguanosine-3'-phosphate
  modified_base 18: mod_base = OTHER; note = 2'-O-methyladenosine-3'-phosphate
  modified_base 19: mod_base = OTHER; note = 2'-O-methylguanosine-3'-phosphorothioate
  modified_base 20: mod_base = OTHER; note = 2'-O-methylguanosine-3'-phosphorothioate
  modified_base 21: mod_base = OTHER; note = 2'-O-methyladenosine-3'-phosphate
gccatctttaagtctggagga

SEQ ID NO: 705 - RNA, 21 nt, synthetic construct
  source 1..21: mol_type = other RNA
  modified_base 1: mod_base = OTHER; note = 2'-O-methyluridine-3'-phosphorothioate
  modified_base 2: mod_base = OTHER; note = 2'-O-methylguanosine-3'-phosphorothioate
  modified_base 3: mod_base = OTHER; note = 2'-O-methylguanosine-3'-phosphate
  modified_base 4: mod_base = OTHER; note = 2'-O-methyluridine-3'-phosphate
  modified_base 5: mod_base = OTHER; note = 2'-O-methyluridine-3'-phosphate
  modified_base 6: mod_base = OTHER; note = 2'-O-methylcytidine-3'-phosphate
  modified_base 7: mod_base = OTHER; note = 2'-O-methyladenosine-3'-phosphate
  modified_base 8: mod_base = OTHER; note = 2'-O-methylcytidine-3'-phosphate
  modified_base 9: mod_base = OTHER; note = 2'-fluorocytidine-3'-phosphate
  modified_base 10: mod_base = OTHER; note = 2'-fluoroadenosine-3'-phosphate
  modified_base 11: mod_base = OTHER; note = 2'-fluoroguanosine-3'-phosphate
  modified_base 12: mod_base = OTHER; note = 2'-O-methyluridine-3'-phosphate
  modified_base 13: mod_base = OTHER; note = 2'-O-methylguanosine-3'-phosphate
  modified_base 14: mod_base = OTHER; note = 2'-O-methylguanosine-3'-phosphate
  modified_base 15: mod_base = OTHER; note = 2'-O-methyladenosine-3'-phosphate
  modified_base 16: mod_base = OTHER; note = 2'-O-methyluridine-3'-phosphate
  modified_base 17: mod_base = OTHER; note = 2'-O-methyluridine-3'-phosphate
  modified_base 18: mod_base = OTHER; note = 2'-O-methylcytidine-3'-phosphate
  modified_base 19: mod_base = OTHER; note = 2'-O-methyluridine-3'-phosphorothioate
  modified_base 20: mod_base = OTHER; note = 2'-O-methylguanosine-3'-phosphorothioate
  modified_base 21: mod_base = OTHER; note = 2'-O-methyladenosine-3'-phosphate
tggttcaccagtggattctga

SEQ ID NO: 706 - RNA, 21 nt, synthetic construct
  source 1..21: mol_type = other RNA
  modified_base 1: mod_base = OTHER; note = 2'-O-methyladenosine-3'-phosphorothioate
  modified_base 2: mod_base = OTHER; note = 2'-O-methylcytidine-3'-phosphorothioate
  modified_base 3: mod_base = OTHER; note = 2'-O-methylcytidine-3'-phosphate
  modified_base 4: mod_base = OTHER; note = 2'-O-methyladenosine-3'-phosphate
  modified_base 5: mod_base = OTHER; note = 2'-O-methylguanosine-3'-phosphate
  modified_base 6: mod_base = OTHER; note = 2'-O-methyluridine-3'-phosphate
  modified_base 7: mod_base = OTHER; note = 2'-O-methylguanosine-3'-phosphate
  modified_base 8: mod_base = OTHER; note = 2'-O-methylguanosine-3'-phosphate
  modified_base 9: mod_base = OTHER; note = 2'-fluoroadenosine-3'-phosphate
  modified_base 10: mod_base = OTHER; note = 2'-fluorouridine-3'-phosphate
  modified_base 11: mod_base = OTHER; note = 2'-fluorouridine-3'-phosphate
  modified_base 12: mod_base = OTHER; note = 2'-O-methylcytidine-3'-phosphate
  modified_base 13: mod_base = OTHER; note = 2'-O-methyluridine-3'-phosphate
  modified_base 14: mod_base = OTHER; note = 2'-O-methylguanosine-3'-phosphate
  modified_base 15: mod_base = OTHER; note = 2'-O-methyluridine-3'-phosphate
  modified_base 16: mod_base = OTHER; note = 2'-O-methylguanosine-3'-phosphate
  modified_base 17: mod_base = OTHER; note = 2'-O-methyluridine-3'-phosphate
  modified_base 18: mod_base = OTHER; note = 2'-O-methyluridine-3'-phosphate
  modified_base 19: mod_base = OTHER; note = 2'-O-methylguanosine-3'-phosphorothioate
  modified_base 20: mod_base = OTHER; note = 2'-O-methyluridine-3'-phosphorothioate
  modified_base 21: mod_base = OTHER; note = 2'-O-methyladenosine-3'-phosphate
accagtggattctgtgttgta

SEQ ID NO: 707 - RNA, 21 nt, synthetic construct
  source 1..21: mol_type = other RNA
  modified_base 1: mod_base = OTHER; note = 2'-O-methyladenosine-3'-phosphorothioate
  modified_base 2: mod_base = OTHER; note = 2'-O-methyluridine-3'-phosphorothioate
  modified_base 3: mod_base = OTHER; note = 2'-O-methylguanosine-3'-phosphate
  modified_base 4: mod_base = OTHER; note = 2'-O-methylguanosine-3'-phosphate
  modified_base 5: mod_base = OTHER; note = 2'-O-methylcytidine-3'-phosphate
  modified_base 6: mod_base = OTHER; note = 2'-O-methyladenosine-3'-phosphate
  modified_base 7: mod_base = OTHER; note = 2'-fluoroguanosine-3'-phosphate
  modified_base 8: mod_base = OTHER; note = 2'-O-methyluridine-3'-phosphate
  modified_base 9: mod_base = OTHER; note = 2'-fluoroguanosine-3'-phosphate
  modified_base 10: mod_base = OTHER; note = 2'-fluorocytidine-3'-phosphate
  modified_base 11: mod_base = OTHER; note = 2'-fluoroguanosine-3'-phosphate
  modified_base 12: mod_base = OTHER; note = 2'-O-methyluridine-3'-phosphate
  modified_base 13: mod_base = OTHER; note = 2'-O-methyluridine-3'-phosphate
  modified_base 14: mod_base = OTHER; note = 2'-O-methyluridine-3'-phosphate
  modified_base 15: mod_base = OTHER; note = 2'-O-methyladenosine-3'-phosphate
  modified_base 16: mod_base = OTHER; note = 2'-O-methylguanosine-3'-phosphate
  modified_base 17: mod_base = OTHER; note = 2'-O-methylcytidine-3'-phosphate
  modified_base 18: mod_base = OTHER; note = 2'-O-methyluridine-3'-phosphate
  modified_base 19: mod_base = OTHER; note = 2'-O-methylguanosine-3'-phosphorothioate
  modified_base 20: mod_base = OTHER; note = 2'-O-methylguanosine-3'-phosphorothioate
  modified_base 21: mod_base = OTHER; note = 2'-O-methyladenosine-3'-phosphate
atggcagtgcgtttagctgga

SEQ ID NO: 708 - RNA, 21 nt, synthetic construct
  source 1..21: mol_type = other RNA
  modified_base 1: mod_base = OTHER; note = 2'-O-methyladenosine-3'-phosphorothioate
  modified_base 2: mod_base = OTHER; note = 2'-O-methyluridine-3'-phosphorothioate
  modified_base 3: mod_base = OTHER; note = 2'-O-methylguanosine-3'-phosphate
  modified_base 4: mod_base = OTHER; note = 2'-O-methylguanosine-3'-phosphate
  modified_base 5: mod_base = OTHER; note = 2'-O-methylcytidine-3'-phosphate
  modified_base 6: mod_base = OTHER; note = 2'-O-methyladenosine-3'-phosphate
  modified_base 7: mod_base = OTHER; note = 2'-O-methylguanosine-3'-phosphate
  modified_base 8: mod_base = OTHER; note = 2'-O-methyluridine-3'-phosphate
  modified_base 9: mod_base = OTHER; note = 2'-fluoroguanosine-3'-phosphate
  modified_base 10: mod_base = OTHER; note = 2'-fluorocytidine-3'-phosphate
  modified_base 11: mod_base = OTHER; note = 2'-fluoroguanosine-3'-phosphate
  modified_base 12: mod_base = OTHER; note = 2'-O-methyluridine-3'-phosphate
  modified_base 13: mod_base = OTHER; note = 2'-O-methyluridine-3'-phosphate
  modified_base 14: mod_base = OTHER; note = 2'-O-methyluridine-3'-phosphate
  modified_base 15: mod_base = OTHER; note = 2'-O-methyladenosine-3'-phosphate
  modified_base 16: mod_base = OTHER; note = 2'-O-methylguanosine-3'-phosphate
  modified_base 17: mod_base = OTHER; note = 2'-O-methylcytidine-3'-phosphate
  modified_base 18: mod_base = OTHER; note = 2'-O-methyluridine-3'-phosphate
  modified_base 19: mod_base = OTHER; note = 2'-O-methylguanosine-3'-phosphorothioate
  modified_base 20: mod_base = OTHER; note = 2'-O-methylguanosine-3'-phosphorothioate
  modified_base 21: mod_base = OTHER; note = 2'-O-methyladenosine-3'-phosphate
atggcagtgcgtttagctgga

SEQ ID NO: 709 - RNA, 21 nt, synthetic construct
  source 1..21: mol_type = other RNA
  modified_base 1: mod_base = OTHER; note = 2'-O-methyluridine-3'-phosphorothioate
  modified_base 2: mod_base = OTHER; note = 2'-O-methyluridine-3'-phosphorothioate
  modified_base 3: mod_base = OTHER; note = 2'-O-methylguanosine-3'-phosphate
  modified_base 4: mod_base = OTHER; note = 2'-O-methylcytidine-3'-phosphate
  modified_base 5: mod_base = OTHER; note = 2'-O-methylcytidine-3'-phosphate
  modified_base 6: mod_base = OTHER; note = 2'-O-methyluridine-3'-phosphate
  modified_base 7: mod_base = OTHER; note = 2'-fluorouridine-3'-phosphate
  modified_base 8: mod_base = OTHER; note = 2'-O-methylguanosine-3'-phosphate
  modified_base 9: mod_base = OTHER; note = 2'-fluorocytidine-3'-phosphate
  modified_base 10: mod_base = OTHER; note = 2'-fluorouridine-3'-phosphate
  modified_base 11: mod_base = OTHER; note = 2'-fluorocytidine-3'-phosphate
  modified_base 12: mod_base = OTHER; note = 2'-O-methyladenosine-3'-phosphate
  modified_base 13: mod_base = OTHER; note = 2'-O-methyladenosine-3'-phosphate
  modified_base 14: mod_base = OTHER; note = 2'-O-methylcytidine-3'-phosphate
  modified_base 15: mod_base = OTHER; note = 2'-O-methyladenosine-3'-phosphate
  modified_base 16: mod_base = OTHER; note = 2'-O-methyladenosine-3'-phosphate
  modified_base 17: mod_base = OTHER; note = 2'-O-methyladenosine-3'-phosphate
  modified_base 18: mod_base = OTHER; note = 2'-O-methyladenosine-3'-phosphate
  modified_base 19: mod_base = OTHER; note = 2'-O-methylcytidine-3'-phosphorothioate
  modified_base 20: mod_base = OTHER; note = 2'-O-methyladenosine-3'-phosphorothioate
  modified_base 21: mod_base = OTHER; note = 2'-O-methyladenosine-3'-phosphate
ttgccttgctcaacaaaacaa

SEQ ID NO: 710 - RNA, 21 nt, synthetic construct
  source 1..21: mol_type = other RNA
  modified_base 1: mod_base = OTHER; note = 2'-O-methyluridine-3'-phosphorothioate
  modified_base 2: mod_base = OTHER; note = 2'-O-methylguanosine-3'-phosphorothioate
  modified_base 3: mod_base = OTHER; note = 2'-O-methylcytidine-3'-phosphate
  modified_base 4: mod_base = OTHER; note = 2'-O-methylcytidine-3'-phosphate
  modified_base 5: mod_base = OTHER; note = 2'-O-methyluridine-3'-phosphate
  modified_base 6: mod_base = OTHER; note = 2'-O-methyluridine-3'-phosphate
  modified_base 7: mod_base = OTHER; note = 2'-O-methylguanosine-3'-phosphate
  modified_base 8: mod_base = OTHER; note = 2'-O-methylcytidine-3'-phosphate
  modified_base 9: mod_base = OTHER; note = 2'-fluorouridine-3'-phosphate
  modified_base 10: mod_base = OTHER; note = 2'-fluorocytidine-3'-phosphate
  modified_base 11: mod_base = OTHER; note = 2'-fluoroadenosine-3'-phosphate
  modified_base 12: mod_base = OTHER; note = 2'-O-methyladenosine-3'-phosphate
  modified_base 13: mod_base = OTHER; note = 2'-O-methylcytidine-3'-phosphate
  modified_base 14: mod_base = OTHER; note = 2'-O-methyladenosine-3'-phosphate
  modified_base 15: mod_base = OTHER; note = 2'-O-methyladenosine-3'-phosphate
  modified_base 16: mod_base = OTHER; note = 2'-O-methyladenosine-3'-phosphate
  modified_base 17: mod_base = OTHER; note = 2'-O-methyladenosine-3'-phosphate
  modified_base 18: mod_base = OTHER; note = 2'-O-methylcytidine-3'-phosphate
  modified_base 19: mod_base = OTHER; note = 2'-O-methyladenosine-3'-phosphorothioate
  modified_base 20: mod_base = OTHER; note = 2'-O-methyladenosine-3'-phosphorothioate
  modified_base 21: mod_base = OTHER; note = 2'-O-methyladenosine-3'-phosphate
tgccttgctcaacaaaacaaa

SEQ ID NO: 711 - RNA, 21 nt, synthetic construct
  source 1..21: mol_type = other RNA
  modified_base 1: mod_base = OTHER; note = 2'-O-methyluridine-3'-phosphorothioate
  modified_base 2: mod_base = OTHER; note = 2'-O-methylguanosine-3'-phosphorothioate
  modified_base 3: mod_base = OTHER; note = 2'-O-methylcytidine-3'-phosphate
  modified_base 4: mod_base = OTHER; note = 2'-O-methylcytidine-3'-phosphate
  modified_base 5: mod_base = OTHER; note = 2'-O-methyluridine-3'-phosphate
  modified_base 6: mod_base = OTHER; note = 2'-O-methyluridine-3'-phosphate
  modified_base 7: mod_base = OTHER; note = 2'-fluoroguanosine-3'-phosphate
  modified_base 8: mod_base = OTHER; note = 2'-O-methylcytidine-3'-phosphate
  modified_base 9: mod_base = OTHER; note = 2'-fluorouridine-3'-phosphate
  modified_base 10: mod_base = OTHER; note = 2'-fluorocytidine-3'-phosphate
  modified_base 11: mod_base = OTHER; note = 2'-fluoroadenosine-3'-phosphate
  modified_base 12: mod_base = OTHER; note = 2'-O-methyladenosine-3'-phosphate
  modified_base 13: mod_base = OTHER; note = 2'-O-methylcytidine-3'-phosphate
  modified_base 14: mod_base = OTHER; note = 2'-O-methyladenosine-3'-phosphate
  modified_base 15: mod_base = OTHER; note = 2'-O-methyladenosine-3'-phosphate
  modified_base 16: mod_base = OTHER; note = 2'-O-methyladenosine-3'-phosphate
  modified_base 17: mod_base = OTHER; note = 2'-O-methyladenosine-3'-phosphate
  modified_base 18: mod_base = OTHER; note = 2'-O-methylcytidine-3'-phosphate
  modified_base 19: mod_base = OTHER; note = 2'-O-methyladenosine-3'-phosphorothioate
  modified_base 20: mod_base = OTHER; note = 2'-O-methyladenosine-3'-phosphorothioate
  modified_base 21: mod_base = OTHER; note = 2'-O-methyladenosine-3'-phosphate
tgccttgctcaacaaaacaaa

SEQ ID NO: 712 - RNA, 21 nt, synthetic construct
  source 1..21: mol_type = other RNA
  modified_base 1: mod_base = OTHER; note = 2'-O-methylguanosine-3'-phosphorothioate
  modified_base 2: mod_base = OTHER; note = 2'-O-methylcytidine-3'-phosphorothioate
  modified_base 3: mod_base = OTHER; note = 2'-O-methylcytidine-3'-phosphate
  modified_base 4: mod_base = OTHER; note = 2'-O-methyluridine-3'-phosphate
  modified_base 5: mod_base = OTHER; note = 2'-O-methyluridine-3'-phosphate
  modified_base 6: mod_base = OTHER; note = 2'-O-methylguanosine-3'-phosphate
  modified_base 7: mod_base = OTHER; note = 2'-fluorocytidine-3'-phosphate
  modified_base 8: mod_base = OTHER; note = 2'-O-methyluridine-3'-phosphate
  modified_base 9: mod_base = OTHER; note = 2'-fluorocytidine-3'-phosphate
  modified_base 10: mod_base = OTHER; note = 2'-fluoroadenosine-3'-phosphate
  modified_base 11: mod_base = OTHER; note = 2'-fluoroadenosine-3'-phosphate
  modified_base 12: mod_base = OTHER; note = 2'-O-methylcytidine-3'-phosphate
  modified_base 13: mod_base = OTHER; note = 2'-O-methyladenosine-3'-phosphate
  modified_base 14: mod_base = OTHER; note = 2'-O-methyladenosine-3'-phosphate
  modified_base 15: mod_base = OTHER; note = 2'-O-methyladenosine-3'-phosphate
  modified_base 16: mod_base = OTHER; note = 2'-O-methyladenosine-3'-phosphate
  modified_base 17: mod_base = OTHER; note = 2'-O-methylcytidine-3'-phosphate
  modified_base 18: mod_base = OTHER; note = 2'-O-methyladenosine-3'-phosphate
  modified_base 19: mod_base = OTHER; note = 2'-O-methyladenosine-3'-phosphorothioate
  modified_base 20: mod_base = OTHER; note = 2'-O-methyladenosine-3'-phosphorothioate
  modified_base 21: mod_base = OTHER; note = 2'-O-methyladenosine-3'-phosphate
gccttgctcaacaaaacaaaa

SEQ ID NO: 713 - RNA, 21 nt, synthetic construct
  source 1..21: mol_type = other RNA
  modified_base 1: mod_base = OTHER; note = 2'-O-methyluridine-3'-phosphorothioate
  modified_base 2: mod_base = OTHER; note = 2'-O-methyluridine-3'-phosphorothioate
  modified_base 3: mod_base = OTHER; note = 2'-O-methyladenosine-3'-phosphate
  modified_base 4: mod_base = OTHER; note = 2'-O-methyladenosine-3'-phosphate
  modified_base 5: mod_base = OTHER; note = 2'-O-methyladenosine-3'-phosphate
  modified_base 6: mod_base = OTHER; note = 2'-O-methyluridine-3'-phosphate
  modified_base 7: mod_base = OTHER; note = 2'-O-methyluridine-3'-phosphate
  modified_base 8: mod_base = OTHER; note = 2'-O-methylcytidine-3'-phosphate
  modified_base 9: mod_base = OTHER; note = 2'-fluorouridine-3'-phosphate
  modified_base 10: mod_base = OTHER; note = 2'-fluorouridine-3'-phosphate
  modified_base 11: mod_base = OTHER; note = 2'-fluoroguanosine-3'-phosphate
  modified_base 12: mod_base = OTHER; note = 2'-O-methylguanosine-3'-phosphate
  modified_base 13: mod_base = OTHER; note = 2'-O-methylcytidine-3'-phosphate
  modified_base 14: mod_base = OTHER; note = 2'-O-methyluridine-3'-phosphate
  modified_base 15: mod_base = OTHER; note = 2'-O-methyladenosine-3'-phosphate
  modified_base 16: mod_base = OTHER; note = 2'-O-methyluridine-3'-phosphate
  modified_base 17: mod_base = OTHER; note = 2'-O-methyluridine-3'-phosphate
  modified_base 18: mod_base = OTHER; note = 2'-O-methyladenosine-3'-phosphate
  modified_base 19: mod_base = OTHER; note = 2'-O-methylcytidine-3'-phosphorothioate
  modified_base 20: mod_base = OTHER; note = 2'-O-methylguanosine-3'-phosphorothioate
  modified_base 21: mod_base = OTHER; note = 2'-O-methyladenosine-3'-phosphate
ttaaattcttggctattacga

SEQ ID NO: 714 - RNA, 21 nt, synthetic construct
  source 1..21: mol_type = other RNA
  modified_base 1: mod_base = OTHER; note = 2'-O-methyladenosine-3'-phosphorothioate
  modified_base 2: mod_base = OTHER; note = 2'-O-methyluridine-3'-phosphorothioate
  modified_base 3: mod_base = OTHER; note = 2'-O-methyluridine-3'-phosphate
  modified_base 4: mod_base = OTHER; note = 2'-O-methylcytidine-3'-phosphate
  modified_base 5: mod_base = OTHER; note = 2'-O-methyluridine-3'-phosphate
  modified_base 6: mod_base = OTHER; note = 2'-O-methyluridine-3'-phosphate
  modified_base 7: mod_base = OTHER; note = 2'-O-methylguanosine-3'-phosphate
  modified_base 8: mod_base = OTHER; note = 2'-O-methylguanosine-3'-phosphate
  modified_base 9: mod_base = OTHER; note = 2'-fluorocytidine-3'-phosphate
  modified_base 10: mod_base = OTHER; note = 2'-fluorouridine-3'-phosphate
  modified_base 11: mod_base = OTHER; note = 2'-fluoroadenosine-3'-phosphate
  modified_base 12: mod_base = OTHER; note = 2'-O-methyluridine-3'-phosphate
  modified_base 13: mod_base = OTHER; note = 2'-O-methyluridine-3'-phosphate
  modified_base 14: mod_base = OTHER; note = 2'-O-methyladenosine-3'-phosphate
  modified_base 15: mod_base = OTHER; note = 2'-O-methylcytidine-3'-phosphate
  modified_base 16: mod_base = OTHER; note = 2'-O-methylguanosine-3'-phosphate
  modified_base 17: mod_base = OTHER; note = 2'-O-methyladenosine-3'-phosphate
  modified_base 18: mod_base = OTHER; note = 2'-O-methylcytidine-3'-phosphate
  modified_base 19: mod_base = OTHER; note = 2'-O-methyladenosine-3'-phosphorothioate
  modified_base 20: mod_base = OTHER; note = 2'-O-methylguanosine-3'-phosphorothioate
  modified_base 21: mod_base = OTHER; note = 2'-O-methyladenosine-3'-phosphate
attcttggctattacgacaga

SEQ ID NO: 715 - RNA, 21 nt, synthetic construct
  source 1..21: mol_type = other RNA
  modified_base 1: mod_base = OTHER; note = 2'-O-methylguanosine-3'-phosphorothioate
  modified_base 2: mod_base = OTHER; note = 2'-O-methylguanosine-3'-phosphorothioate
  modified_base 3: mod_base = OTHER; note = 2'-O-methylcytidine-3'-phosphate
  modified_base 4: mod_base = OTHER; note = 2'-O-methyluridine-3'-phosphate
  modified_base 5: mod_base = OTHER; note = 2'-O-methyladenosine-3'-phosphate
  modified_base 6: mod_base = OTHER; note = 2'-O-methyluridine-3'-phosphate
  modified_base 7: mod_base = OTHER; note = 2'-fluorouridine-3'-phosphate
  modified_base 8: mod_base = OTHER; note = 2'-O-methyladenosine-3'-phosphate
  modified_base 9: mod_base = OTHER; note = 2'-fluorocytidine-3'-phosphate
  modified_base 10: mod_base = OTHER; note = 2'-fluoroguanosine-3'-phosphate
  modified_base 11: mod_base = OTHER; note = 2'-fluoroadenosine-3'-phosphate
  modified_base 12: mod_base = OTHER; note = 2'-O-methylcytidine-3'-phosphate
  modified_base 13: mod_base = OTHER; note = 2'-O-methyladenosine-3'-phosphate
  modified_base 14: mod_base = OTHER; note = 2'-O-methylguanosine-3'-phosphate
  modified_base 15: mod_base = OTHER; note = 2'-O-methyladenosine-3'-phosphate
  modified_base 16: mod_base = OTHER; note = 2'-O-methylcytidine-3'-phosphate
  modified_base 17: mod_base = OTHER; note = 2'-O-methyluridine-3'-phosphate
  modified_base 18: mod_base = OTHER; note = 2'-O-methylguanosine-3'-phosphate
  modified_base 19: mod_base = OTHER; note = 2'-O-methylcytidine-3'-phosphorothioate
  modified_base 20: mod_base = OTHER; note = 2'-O-methylcytidine-3'-phosphorothioate
  modified_base 21: mod_base = OTHER; note = 2'-O-methyladenosine-3'-phosphate
ggctattacgacagactgcca

SEQ ID NO: 716 - RNA, 21 nt, synthetic construct
  source 1..21: mol_type = other RNA
  modified_base 1: mod_base = OTHER; note = 2'-O-methyluridine-3'-phosphorothioate
  modified_base 2: mod_base = OTHER; note = 2'-O-methyladenosine-3'-phosphorothioate
  modified_base 3: mod_base = OTHER; note = 2'-O-methylcytidine-3'-phosphate
  modified_base 4: mod_base = OTHER; note = 2'-O-methylguanosine-3'-phosphate
  modified_base 5: mod_base = OTHER; note = 2'-O-methyladenosine-3'-phosphate
  modified_base 6: mod_base = OTHER; note = 2'-O-methylcytidine-3'-phosphate
  modified_base 7: mod_base = OTHER; note = 2'-fluoroadenosine-3'-phosphate
  modified_base 8: mod_base = OTHER; note = 2'-O-methylguanosine-3'-phosphate
  modified_base 9: mod_base = OTHER; note = 2'-fluoroadenosine-3'-phosphate
  modified_base 10: mod_base = OTHER; note = 2'-fluorocytidine-3'-phosphate
  modified_base 11: mod_base = OTHER; note = 2'-fluorouridine-3'-phosphate
  modified_base 12: mod_base = OTHER; note = 2'-O-methylguanosine-3'-phosphate
  modified_base 13: mod_base = OTHER; note = 2'-O-methylcytidine-3'-phosphate
  modified_base 14: mod_base = OTHER; note = 2'-O-methylcytidine-3'-phosphate
  modified_base 15: mod_base = OTHER; note = 2'-O-methyluridine-3'-phosphate
  modified_base 16: mod_base = OTHER; note = 2'-O-methyluridine-3'-phosphate
  modified_base 17: mod_base = OTHER; note = 2'-O-methylcytidine-3'-phosphate
  modified_base 18: mod_base = OTHER; note = 2'-O-methyladenosine-3'-phosphate
  modified_base 19: mod_base = OTHER; note = 2'-O-methyladenosine-3'-phosphorothioate
  modified_base 20: mod_base = OTHER; note = 2'-O-methyladenosine-3'-phosphorothioate
  modified_base 21: mod_base = OTHER; note = 2'-O-methyladenosine-3'-phosphate
tacgacagactgccttcaaaa

SEQ ID NO: 717 - RNA, 21 nt, synthetic construct
  source 1..21: mol_type = other RNA
  modified_base 1: mod_base = OTHER; note = 2'-O-methylcytidine-3'-phosphorothioate
  modified_base 2: mod_base = OTHER; note = 2'-O-methyluridine-3'-phosphorothioate
  modified_base 3: mod_base = OTHER; note = 2'-O-methyluridine-3'-phosphate
  modified_base 4: mod_base = OTHER; note = 2'-O-methyluridine-3'-phosphate
  modified_base 5: mod_base = OTHER; note = 2'-O-methyladenosine-3'-phosphate
  modified_base 6: mod_base = OTHER; note = 2'-O-methylguanosine-3'-phosphate
  modified_base 7: mod_base = OTHER; note = 2'-O-methyluridine-3'-phosphate
  modified_base 8: mod_base = OTHER; note = 2'-O-methyladenosine-3'-phosphate
  modified_base 9: mod_base = OTHER; note = 2'-fluoroadenosine-3'-phosphate
  modified_base 10: mod_base = OTHER; note = 2'-fluoroadenosine-3'-phosphate
  modified_base 11: mod_base = OTHER; note = 2'-fluorouridine-3'-phosphate
  modified_base 12: mod_base = OTHER; note = 2'-O-methyladenosine-3'-phosphate
  modified_base 13: mod_base = OTHER; note = 2'-O-methyluridine-3'-phosphate
  modified_base 14: mod_base = OTHER; note = 2'-O-methyladenosine-3'-phosphate
  modified_base 15: mod_base = OTHER; note = 2'-O-methyladenosine-3'-phosphate
  modified_base 16: mod_base = OTHER; note = 2'-O-methyluridine-3'-phosphate
  modified_base 17: mod_base = OTHER; note = 2'-O-methylguanosine-3'-phosphate
  modified_base 18: mod_base = OTHER; note = 2'-O-methyladenosine-3'-phosphate
  modified_base 19: mod_base = OTHER; note = 2'-O-methylguanosine-3'-phosphorothioate
  modified_base 20: mod_base = OTHER; note = 2'-O-methylguanosine-3'-phosphorothioate
  modified_base 21: mod_base = OTHER; note = 2'-O-methyladenosine-3'-phosphate
ctttagtaaatataatgagga

SEQ ID NO: 718 - RNA, 21 nt, synthetic construct
  source 1..21: mol_type = other RNA
  modified_base 1: mod_base = OTHER; note = 2'-O-methyluridine-3'-phosphorothioate
  modified_base 2: mod_base = OTHER; note = 2'-O-methyladenosine-3'-phosphorothioate
  modified_base 3: mod_base = OTHER; note = 2'-O-methyluridine-3'-phosphate
  modified_base 4: mod_base = OTHER; note = 2'-O-methyladenosine-3'-phosphate
  modified_base 5: mod_base = OTHER; note = 2'-O-methyladenosine-3'-phosphate
  modified_base 6: mod_base = OTHER; note = 2'-O-methyluridine-3'-phosphate
  modified_base 7: mod_base = OTHER; note = 2'-O-methylguanosine-3'-phosphate
  modified_base 8: mod_base = OTHER; note = 2'-O-methyladenosine-3'-phosphate
  modified_base 9: mod_base = OTHER; note = 2'-fluoroguanosine-3'-phosphate
  modified_base 10: mod_base = OTHER; note = 2'-fluoroguanosine-3'-phosphate
  modified_base 11: mod_base = OTHER; note = 2'-fluoroadenosine-3'-phosphate
  modified_base 12: mod_base = OTHER; note = 2'-O-methylcytidine-3'-phosphate
  modified_base 13: mod_base = OTHER; note = 2'-O-methylcytidine-3'-phosphate
  modified_base 14: mod_base = OTHER; note = 2'-O-methyluridine-3'-phosphate
  modified_base 15: mod_base = OTHER; note = 2'-O-methyladenosine-3'-phosphate
  modified_base 16: mod_base = OTHER; note = 2'-O-methyluridine-3'-phosphate
  modified_base 17: mod_base = OTHER; note = 2'-O-methyladenosine-3'-phosphate
  modified_base 18: mod_base = OTHER; note = 2'-O-methylcytidine-3'-phosphate
  modified_base 19: mod_base = OTHER; note = 2'-O-methyluridine-3'-phosphorothioate
  modified_base 20: mod_base = OTHER; note = 2'-O-methyluridine-3'-phosphorothioate
  modified_base 21: mod_base = OTHER; note = 2'-O-methyladenosine-3'-phosphate
tataatgaggacctatactta

SEQ ID NO: 719 - RNA, 21 nt, synthetic construct
  source 1..21: mol_type = other RNA
  modified_base 1: mod_base = OTHER; note = 2'-O-methyladenosine-3'-phosphorothioate
  modified_base 2: mod_base = OTHER; note = 2'-O-methylguanosine-3'-phosphorothioate
  modified_base 3: mod_base = OTHER; note = 2'-O-methylcytidine-3'-phosphate
  modified_base 4: mod_base = OTHER; note = 2'-O-methyluridine-3'-phosphate
  modified_base 5: mod_base = OTHER; note = 2'-O-methylguanosine-3'-phosphate
  modified_base 6: mod_base = OTHER; note = 2'-O-methylguanosine-3'-phosphate
  modified_base 7: mod_base = OTHER; note = 2'-fluorouridine-3'-phosphate
  modified_base 8: mod_base = OTHER; note = 2'-O-methylguanosine-3'-phosphate
  modified_base 9: mod_base = OTHER; note = 2'-fluoroguanosine-3'-phosphate
  modified_base 10: mod_base = OTHER; note = 2'-fluoroadenosine-3'-phosphate
  modified_base 11: mod_base = OTHER; note = 2'-fluoroadenosine-3'-phosphate
  modified_base 12: mod_base = OTHER; note = 2'-O-methyluridine-3'-phosphate
  modified_base 13: mod_base = OTHER; note = 2'-O-methylguanosine-3'-phosphate
  modified_base 14: mod_base = OTHER; note = 2'-O-methylcytidine-3'-phosphate
  modified_base 15: mod_base = OTHER; note = 2'-O-methyladenosine-3'-phosphate
  modified_base 16: mod_base = OTHER; note = 2'-O-methyladenosine-3'-phosphate
  modified_base 17: mod_base = OTHER; note = 2'-O-methylguanosine-3'-phosphate
  modified_base 18: mod_base = OTHER; note = 2'-O-methylcytidine-3'-phosphate
  modified_base 19: mod_base = OTHER; note = 2'-O-methyluridine-3'-phosphorothioate
  modified_base 20: mod_base = OTHER; note = 2'-O-methyluridine-3'-phosphorothioate
  modified_base 21: mod_base = OTHER; note = 2'-O-methyladenosine-3'-phosphate
agctggtggaatgcaagctta

SEQ ID NO: 720 - RNA, 21 nt, synthetic construct
  source 1..21: mol_type = other RNA
  modified_base 1: mod_base = OTHER; note = 2'-O-methylcytidine-3'-phosphorothioate
  modified_base 2: mod_base = OTHER; note = 2'-O-methyladenosine-3'-phosphorothioate
  modified_base 3: mod_base = OTHER; note = 2'-O-methylguanosine-3'-phosphate
  modified_base 4: mod_base = OTHER; note = 2'-O-methyladenosine-3'-phosphate
  modified_base 5: mod_base = OTHER; note = 2'-O-methyluridine-3'-phosphate
  modified_base 6: mod_base = OTHER; note = 2'-O-methylcytidine-3'-phosphate
  modified_base 7: mod_base = OTHER; note = 2'-O-methylcytidine-3'-phosphate
  modified_base 8: mod_base = OTHER; note = 2'-O-methyladenosine-3'-phosphate
  modified_base 9: mod_base = OTHER; note = 2'-fluoroadenosine-3'-phosphate
  modified_base 10: mod_base = OTHER; note = 2'-fluoroguanosine-3'-phosphate
  modified_base 11: mod_base = OTHER; note = 2'-fluorouridine-3'-phosphate
  modified_base 12: mod_base = OTHER; note = 2'-O-methylcytidine-3'-phosphate
  modified_base 13: mod_base = OTHER; note = 2'-O-methyladenosine-3'-phosphate
  modified_base 14: mod_base = OTHER; note = 2'-O-methyladenosine-3'-phosphate
  modified_base 15: mod_base = OTHER; note = 2'-O-methylcytidine-3'-phosphate
  modified_base 16: mod_base = OTHER; note = 2'-O-methylguanosine-3'-phosphate
  modified_base 17: mod_base = OTHER; note = 2'-O-methyluridine-3'-phosphate
  modified_base 18: mod_base = OTHER; note = 2'-O-methylcytidine-3'-phosphate
  modified_base 19: mod_base = OTHER; note = 2'-O-methyluridine-3'-phosphorothioate
  modified_base 20: mod_base = OTHER; note = 2'-O-methyluridine-3'-phosphorothioate
  modified_base 21: mod_base = OTHER; note = 2'-O-methyladenosine-3'-phosphate
cagatccaagtcaacgtctta

SEQ ID NO: 721 - RNA, 21 nt, synthetic construct
  source 1..21: mol_type = other RNA
  modified_base 1: mod_base = OTHER; note = 2'-O-methylcytidine-3'-phosphorothioate
  modified_base 2: mod_base = OTHER; note = 2'-O-methylcytidine-3'-phosphorothioate
  modified_base 3: mod_base = OTHER; note = 2'-O-methyladenosine-3'-phosphate
  modified_base 4: mod_base = OTHER; note = 2'-O-methyladenosine-3'-phosphate
  modified_base 5: mod_base = OTHER; note = 2'-O-methylguanosine-3'-phosphate
  modified_base 6: mod_base = OTHER; note = 2'-O-methyluridine-3'-phosphate
  modified_base 7: mod_base = OTHER; note = 2'-fluorocytidine-3'-phosphate
  modified_base 8: mod_base = OTHER; note = 2'-O-methyladenosine-3'-phosphate
  modified_base 9: mod_base = OTHER; note = 2'-fluoroadenosine-3'-phosphate
  modified_base 10: mod_base = OTHER; note = 2'-fluorocytidine-3'-phosphate
  modified_base 11: mod_base = OTHER; note = 2'-fluoroguanosine-3'-phosphate
  modified_base 12: mod_base = OTHER; note = 2'-O-methyluridine-3'-phosphate
  modified_base 13: mod_base = OTHER; note = 2'-O-methylcytidine-3'-phosphate
  modified_base 14: mod_base = OTHER; note = 2'-O-methyluridine-3'-phosphate
  modified_base 15: mod_base = OTHER; note = 2'-O-methyluridine-3'-phosphate
  modified_base 16: mod_base = OTHER; note = 2'-O-methylguanosine-3'-phosphate
  modified_base 17: mod_base = OTHER; note = 2'-O-methyluridine-3'-phosphate
  modified_base 18: mod_base = OTHER; note = 2'-O-methyluridine-3'-phosphate
  modified_base 19: mod_base = OTHER; note = 2'-O-methylcytidine-3'-phosphorothioate
  modified_base 20: mod_base = OTHER; note = 2'-O-methyladenosine-3'-phosphorothioate
  modified_base 21: mod_base = OTHER; note = 2'-O-methyladenosine-3'-phosphate
ccaagtcaacgtcttgttcaa

SEQ ID NO: 722 - RNA, 21 nt, synthetic construct
  source 1..21: mol_type = other RNA
  modified_base 1: mod_base = OTHER; note = 2'-O-methylcytidine-3'-phosphorothioate
  modified_base 2: mod_base = OTHER; note = 2'-O-methylcytidine-3'-phosphorothioate
  modified_base 3: mod_base = OTHER; note = 2'-O-methyladenosine-3'-phosphate
  modified_base 4: mod_base = OTHER; note = 2'-O-methyladenosine-3'-phosphate
  modified_base 5: mod_base = OTHER; note = 2'-O-methylguanosine-3'-phosphate
  modified_base 6: mod_base = OTHER; note = 2'-O-methyluridine-3'-phosphate
  modified_base 7: mod_base = OTHER; note = 2'-O-methylcytidine-3'-phosphate
  modified_base 8: mod_base = OTHER; note = 2'-O-methyladenosine-3'-phosphate
  modified_base 9: mod_base = OTHER; note = 2'-fluoroadenosine-3'-phosphate
  modified_base 10: mod_base = OTHER; note = 2'-fluorocytidine-3'-phosphate
  modified_base 11: mod_base = OTHER; note = 2'-fluoroguanosine-3'-phosphate
  modified_base 12: mod_base = OTHER; note = 2'-O-methyluridine-3'-phosphate
  modified_base 13: mod_base = OTHER; note = 2'-O-methylcytidine-3'-phosphate
  modified_base 14: mod_base = OTHER; note = 2'-O-methyluridine-3'-phosphate
  modified_base 15: mod_base = OTHER; note = 2'-O-methyluridine-3'-phosphate
  modified_base 16: mod_base = OTHER; note = 2'-O-methylguanosine-3'-phosphate
  modified_base 17: mod_base = OTHER; note = 2'-O-methyluridine-3'-phosphate
  modified_base 18: mod_base = OTHER; note = 2'-O-methyluridine-3'-phosphate
  modified_base 19: mod_base = OTHER; note = 2'-O-methylcytidine-3'-phosphorothioate
  modified_base 20: mod_base = OTHER; note = 2'-O-methyladenosine-3'-phosphorothioate
  modified_base 21: mod_base = OTHER; note = 2'-O-methyladenosine-3'-phosphate
ccaagtcaacgtcttgttcaa

SEQ ID NO: 723 - RNA, 21 nt, synthetic construct
  source 1..21: mol_type = other RNA
  modified_base 1: mod_base = OTHER; note = 2'-O-methyladenosine-3'-phosphorothioate
  modified_base 2: mod_base = OTHER; note = 2'-O-methylguanosine-3'-phosphorothioate
  modified_base 3: mod_base = OTHER; note = 2'-O-methyladenosine-3'-phosphate
  modified_base 4: mod_base = OTHER; note = 2'-O-methyladenosine-3'-phosphate
  modified_base 5: mod_base = OTHER; note = 2'-O-methylcytidine-3'-phosphate
  modified_base 6: mod_base = OTHER; note = 2'-O-methyluridine-3'-phosphate
  modified_base 7: mod_base = OTHER; note = 2'-fluoroguanosine-3'-phosphate
  modified_base 8: mod_base = OTHER; note = 2'-O-methyluridine-3'-phosphate
  modified_base 9: mod_base = OTHER; note = 2'-fluorocytidine-3'-phosphate
  modified_base 10: mod_base = OTHER; note = 2'-fluorouridine-3'-phosphate
  modified_base 11: mod_base = OTHER; note = 2'-fluorouridine-3'-phosphate
  modified_base 12: mod_base = OTHER; note = 2'-O-methyluridine-3'-phosphate
  modified_base 13: mod_base = OTHER; note = 2'-O-methylguanosine-3'-phosphate
  modified_base 14: mod_base = OTHER; note = 2'-O-methylguanosine-3'-phosphate
  modified_base 15: mod_base = OTHER; note = 2'-O-methyladenosine-3'-phosphate
  modified_base 16: mod_base = OTHER; note = 2'-O-methylcytidine-3'-phosphate
  modified_base 17: mod_base = OTHER; note = 2'-O-methyluridine-3'-phosphate
  modified_base 18: mod_base = OTHER; note = 2'-O-methylcytidine-3'-phosphate
  modified_base 19: mod_base = OTHER; note = 2'-O-methyluridine-3'-phosphorothioate
  modified_base 20: mod_base = OTHER; note = 2'-O-methylcytidine-3'-phosphorothioate
  modified_base 21: mod_base = OTHER; note = 2'-O-methyladenosine-3'-phosphate
agaactgtctttggactctca

SEQ ID NO: 724 - RNA, 21 nt, synthetic construct
  source 1..21: mol_type = other RNA
  modified_base 1: mod_base = OTHER; note = 2'-O-methylcytidine-3'-phosphorothioate
  modified_base 2: mod_base = OTHER; note = 2'-O-methyluridine-3'-phosphorothioate
  modified_base 3: mod_base = OTHER; note = 2'-O-methyluridine-3'-phosphate
  modified_base 4: mod_base = OTHER; note = 2'-O-methyluridine-3'-phosphate
  modified_base 5: mod_base = OTHER; note = 2'-O-methylcytidine-3'-phosphate
  modified_base 6: mod_base = OTHER; note = 2'-O-methyladenosine-3'-phosphate
  modified_base 7: mod_base = OTHER; note = 2'-fluoroguanosine-3'-phosphate
  modified_base 8: mod_base = OTHER; note = 2'-O-methyladenosine-3'-phosphate
  modified_base 9: mod_base = OTHER; note = 2'-fluorouridine-3'-phosphate
  modified_base 10: mod_base = OTHER; note = 2'-fluoroguanosine-3'-phosphate
  modified_base 11: mod_base = OTHER; note = 2'-fluorocytidine-3'-phosphate
  modified_base 12: mod_base = OTHER; note = 2'-O-methyluridine-3'-phosphate
  modified_base 13: mod_base = OTHER; note = 2'-O-methylguanosine-3'-phosphate
  modified_base 14: mod_base = OTHER; note = 2'-O-methylcytidine-3'-phosphate
  modified_base 15: mod_base = OTHER; note = 2'-O-methyladenosine-3'-phosphate
  modified_base 16: mod_base = OTHER; note = 2'-O-methyladenosine-3'-phosphate
  modified_base 17: mod_base = OTHER; note = 2'-O-methylcytidine-3'-phosphate
  modified_base 18: mod_base = OTHER; note = 2'-O-methyluridine-3'-phosphate
  modified_base 19: mod_base = OTHER; note = 2'-O-methyladenosine-3'-phosphorothioate
  modified_base 20: mod_base = OTHER; note = 2'-O-methyladenosine-3'-phosphorothioate
  modified_base 21: mod_base = OTHER; note = 2'-O-methyladenosine-3'-phosphate
ctttcagatgctgcaactaaa

SEQ ID NO: 725 - RNA, 21 nt, synthetic construct
  source 1..21: mol_type = other RNA
  modified_base 1: mod_base = OTHER; note = 2'-O-methyluridine-3'-phosphorothioate
  modified_base 2: mod_base = OTHER; note = 2'-O-methylcytidine-3'-phosphorothioate
  modified_base 3: mod_base = OTHER; note = 2'-O-methyladenosine-3'-phosphate
  modified_base 4: mod_base = OTHER; note = 2'-O-methylguanosine-3'-phosphate
  modified_base 5: mod_base = OTHER; note = 2'-O-methyladenosine-3'-phosphate
  modified_base 6: mod_base = OTHER; note = 2'-O-methyluridine-3'-phosphate
  modified_base 7: mod_base = OTHER; note = 2'-fluoroguanosine-3'-phosphate
  modified_base 8: mod_base = OTHER; note = 2'-O-methylcytidine-3'-phosphate
  modified_base 9: mod_base = OTHER; note = 2'-fluorouridine-3'-phosphate
  modified_base 10: mod_base = OTHER; note = 2'-fluoroguanosine-3'-phosphate
  modified_base 11: mod_base = OTHER; note = 2'-fluorocytidine-3'-phosphate
  modified_base 12: mod_base = OTHER; note = 2'-O-methyladenosine-3'-phosphate
  modified_base 13: mod_base = OTHER; note = 2'-O-methyladenosine-3'-phosphate
  modified_base 14: mod_base = OTHER; note = 2'-O-methylcytidine-3'-phosphate
  modified_base 15: mod_base = OTHER; note = 2'-O-methyluridine-3'-phosphate
  modified_base 16: mod_base = OTHER; note = 2'-O-methyladenosine-3'-phosphate
  modified_base 17: mod_base = OTHER; note = 2'-O-methyladenosine-3'-phosphate
  modified_base 18: mod_base = OTHER; note = 2'-O-methyladenosine-3'-phosphate
  modified_base 19: mod_base = OTHER; note = 2'-O-methylcytidine-3'-phosphorothioate
  modified_base 20: mod_base = OTHER; note = 2'-O-methyladenosine-3'-phosphorothioate
  modified_base 21: mod_base = OTHER; note = 2'-O-methyladenosine-3'-phosphate
tcagatgctgcaactaaacaa

SEQ ID NO: 726 - RNA, 21 nt, synthetic construct
  source 1..21: mol_type = other RNA
  modified_base 1: mod_base = OTHER; note = 2'-O-methylguanosine-3'-phosphorothioate
  modified_base 2: mod_base = OTHER; note = 2'-O-methyladenosine-3'-phosphorothioate
  modified_base 3: mod_base = OTHER; note = 2'-O-methyluridine-3'-phosphate
  modified_base 4: mod_base = OTHER; note = 2'-O-methylguanosine-3'-phosphate
  modified_base 5: mod_base = OTHER; note = 2'-O-methylcytidine-3'-phosphate
  modified_base 6: mod_base = OTHER; note = 2'-O-methyluridine-3'-phosphate
  modified_base 7: mod_base = OTHER; note = 2'-fluoroguanosine-3'-phosphate
  modified_base 8: mod_base = OTHER; note = 2'-O-methylcytidine-3'-phosphate
  modified_base 9: mod_base = OTHER; note = 2'-fluoroadenosine-3'-phosphate
  modified_base 10: mod_base = OTHER; note = 2'-fluoroadenosine-3'-phosphate
  modified_base 11: mod_base = OTHER; note = 2'-fluorocytidine-3'-phosphate
  modified_base 12: mod_base = OTHER; note = 2'-O-methyluridine-3'-phosphate
  modified_base 13: mod_base = OTHER; note = 2'-O-methyladenosine-3'-phosphate
  modified_base 14: mod_base = OTHER; note = 2'-O-methyladenosine-3'-phosphate
  modified_base 15: mod_base = OTHER; note = 2'-O-methyladenosine-3'-phosphate
  modified_base 16: mod_base = OTHER; note = 2'-O-methylcytidine-3'-phosphate
  modified_base 17: mod_base = OTHER; note = 2'-O-methyladenosine-3'-phosphate
  modified_base 18: mod_base = OTHER; note = 2'-O-methylguanosine-3'-phosphate
  modified_base 19: mod_base = OTHER; note = 2'-O-methylguanosine-3'-phosphorothioate
  modified_base 20: mod_base = OTHER; note = 2'-O-methyladenosine-3'-phosphorothioate
  modified_base 21: mod_base = OTHER; note = 2'-O-methyladenosine-3'-phosphate
gatgctgcaactaaacaggaa

SEQ ID NO: 727 - RNA, 21 nt, synthetic construct
  source 1..21: mol_type = other RNA
  modified_base 1: mod_base = OTHER; note = 2'-O-methylcytidine-3'-phosphorothioate
  modified_base 2: mod_base = OTHER; note = 2'-O-methyluridine-3'-phosphorothioate
  modified_base 3: mod_base = OTHER; note = 2'-O-methylguanosine-3'-phosphate
  modified_base 4: mod_base = OTHER; note = 2'-O-methylcytidine-3'-phosphate
  modified_base 5: mod_base = OTHER; note = 2'-O-methyladenosine-3'-phosphate
  modified_base 6: mod_base = OTHER; note = 2'-O-methyladenosine-3'-phosphate
  modified_base 7: mod_base = OTHER; note = 2'-O-methylcytidine-3'-phosphate
  modified_base 8: mod_base = OTHER; note = 2'-O-methyluridine-3'-phosphate
  modified_base 9: mod_base = OTHER; note = 2'-fluoroadenosine-3'-phosphate
  modified_base 10: mod_base = OTHER; note = 2'-fluoroadenosine-3'-phosphate
  modified_base 11: mod_base = OTHER; note = 2'-fluoroadenosine-3'-phosphate
  modified_base 12: mod_base = OTHER; note = 2'-O-methylcytidine-3'-phosphate
  modified_base 13: mod_base = OTHER; note = 2'-O-methyladenosine-3'-phosphate
  modified_base 14: mod_base = OTHER; note = 2'-O-methylguanosine-3'-phosphate
  modified_base 15: mod_base = OTHER; note = 2'-O-methylguanosine-3'-phosphate
  modified_base 16: mod_base = OTHER; note = 2'-O-methyladenosine-3'-phosphate
  modified_base 17: mod_base = OTHER; note = 2'-O-methyladenosine-3'-phosphate
  modified_base 18: mod_base = OTHER; note = 2'-O-methylguanosine-3'-phosphate
  modified_base 19: mod_base = OTHER; note = 2'-O-methylguanosine-3'-phosphorothioate
  modified_base 20: mod_base = OTHER; note = 2'-O-methylguanosine-3'-phosphorothioate
  modified_base 21: mod_base = OTHER; note = 2'-O-methyladenosine-3'-phosphate
ctgcaactaaacaggaaggga

SEQ ID NO: 728 - RNA, 21 nt, synthetic construct
  source 1..21: mol_type = other RNA
  modified_base 1: mod_base = OTHER; note = 2'-O-methylguanosine-3'-phosphorothioate
  modified_base 2: mod_base = OTHER; note = 2'-O-methyladenosine-3'-phosphorothioate
  modified_base 3: mod_base = OTHER; note = 2'-O-methyladenosine-3'-phosphate
  modified_base 4: mod_base = OTHER; note = 2'-O-methylguanosine-3'-phosphate
  modified_base 5: mod_base = OTHER; note = 2'-O-methylguanosine-3'-phosphate
  modified_base 6: mod_base = OTHER; note = 2'-O-methylguanosine-3'-phosphate
  modified_base 7: mod_base = OTHER; note = 2'-fluoroadenosine-3'-phosphate
  modified_base 8: mod_base = OTHER; note = 2'-O-methyluridine-3'-phosphate
  modified_base 9: mod_base = OTHER; note = 2'-fluoroguanosine-3'-phosphate
  modified_base 10: mod_base = OTHER; note = 2'-fluoroguanosine-3'-phosphate
  modified_base 11: mod_base = OTHER; note = 2'-fluoroadenosine-3'-phosphate
  modified_base 12: mod_base = OTHER; note = 2'-O-methyladenosine-3'-phosphate
  modified_base 13: mod_base = OTHER; note = 2'-O-methylguanosine-3'-phosphate
  modified_base 14: mod_base = OTHER; note = 2'-O-methylguanosine-3'-phosphate
  modified_base 15: mod_base = OTHER; note = 2'-O-methyluridine-3'-phosphate
  modified_base 16: mod_base = OTHER; note = 2'-O-methylcytidine-3'-phosphate
  modified_base 17: mod_base = OTHER; note = 2'-O-methyluridine-3'-phosphate
  modified_base 18: mod_base = OTHER; note = 2'-O-methylcytidine-3'-phosphate
  modified_base 19: mod_base = OTHER; note = 2'-O-methylcytidine-3'-phosphorothioate
  modified_base 20: mod_base = OTHER; note = 2'-O-methyluridine-3'-phosphorothioate
  modified_base 21: mod_base = OTHER; note = 2'-O-methyladenosine-3'-phosphate
gaagggatggaaggtctccta

SEQ ID NO: 729 - RNA, 21 nt, synthetic construct
  source 1..21: mol_type = other RNA
  modified_base 1: mod_base = OTHER; note = 2'-O-methylcytidine-3'-phosphorothioate
  modified_base 2: mod_base = OTHER; note = 2'-O-methyluridine-3'-phosphorothioate
  modified_base 3: mod_base = OTHER; note = 2'-O-methyluridine-3'-phosphate
  modified_base 4: mod_base = OTHER; note = 2'-O-methylcytidine-3'-phosphate
  modified_base 5: mod_base = OTHER; note = 2'-O-methyluridine-3'-phosphate
  modified_base 6: mod_base = OTHER; note = 2'-O-methylguanosine-3'-phosphate
  modified_base 7: mod_base = OTHER; note = 2'-fluoroguanosine-3'-phosphate
  modified_base 8: mod_base = OTHER; note = 2'-O-methylguanosine-3'-phosphate
  modified_base 9: mod_base = OTHER; note = 2'-fluorouridine-3'-phosphate
  modified_base 10: mod_base = OTHER; note = 2'-fluorouridine-3'-phosphate
  modified_base 11: mod_base = OTHER; note = 2'-fluorocytidine-3'-phosphate
  modified_base 12: mod_base = OTHER; note = 2'-O-methyladenosine-3'-phosphate
  modified_base 13: mod_base = OTHER; note = 2'-O-methylguanosine-3'-phosphate
  modified_base 14: mod_base = OTHER; note = 2'-O-methyladenosine-3'-phosphate
  modified_base 15: mod_base = OTHER; note = 2'-O-methyluridine-3'-phosphate
  modified_base 16: mod_base = OTHER; note = 2'-O-methylguanosine-3'-phosphate
  modified_base 17: mod_base = OTHER; note = 2'-O-methyladenosine-3'-phosphate
  modified_base 18: mod_base = OTHER; note = 2'-O-methyluridine-3'-phosphate
  modified_base 19: mod_base = OTHER; note = 2'-O-methyladenosine-3'-phosphorothioate
  modified_base 20: mod_base = OTHER; note = 2'-O-methyluridine-3'-phosphorothioate
  modified_base 21: mod_base = OTHER; note = 2'-O-methyladenosine-3'-phosphate
cttctgggttcagatgatata

SEQ ID NO: 730 - RNA, 21 nt, synthetic construct
  source 1..21: mol_type = other RNA
  modified_base 1: mod_base = OTHER; note = 2'-O-methylcytidine-3'-phosphorothioate
  modified_base 2: mod_base = OTHER; note = 2'-O-methylcytidine-3'-phosphorothioate
  modified_base 3: mod_base = OTHER; note = 2'-O-methyluridine-3'-phosphate
  modified_base 4: mod_base = OTHER; note = 2'-O-methylguanosine-3'-phosphate
  modified_base 5: mod_base = OTHER; note = 2'-O-methyluridine-3'-phosphate
  modified_base 6: mod_base = OTHER; note = 2'-O-methylguanosine-3'-phosphate
  modified_base 7: mod_base = OTHER; note = 2'-O-methylcytidine-3'-phosphate
  modified_base 8: mod_base = OTHER; note = 2'-O-methyladenosine-3'-phosphate
  modified_base 9: mod_base = OTHER; note = 2'-fluoroguanosine-3'-phosphate
  modified_base 10: mod_base = OTHER; note = 2'-fluorocytidine-3'-phosphate
  modified_base 11: mod_base = OTHER; note = 2'-fluorouridine-3'-phosphate
  modified_base 12: mod_base = OTHER; note = 2'-O-methylguanosine-3'-phosphate
  modified_base 13: mod_base = OTHER; note = 2'-O-methylguanosine-3'-phosphate
  modified_base 14: mod_base = OTHER; note = 2'-O-methyladenosine-3'-phosphate
  modified_base 15: mod_base = OTHER; note = 2'-O-methyladenosine-3'-phosphate
  modified_base 16: mod_base = OTHER; note = 2'-O-methyluridine-3'-phosphate
  modified_base 17: mod_base = OTHER; note = 2'-O-methyluridine-3'-phosphate
  modified_base 18: mod_base = OTHER; note = 2'-O-methylcytidine-3'-phosphate
  modified_base 19: mod_base = OTHER; note = 2'-O-methyluridine-3'-phosphorothioate
  modified_base 20: mod_base = OTHER; note = 2'-O-methyluridine-3'-phosphorothioate
  modified_base 21: mod_base = OTHER; note = 2'-O-methyladenosine-3'-phosphate
cctgtgcagctggaattctta

SEQ ID NO: 731 - RNA, 21 nt, synthetic construct
  source 1..21: mol_type = other RNA
  modified_base 1: mod_base = OTHER; note = 2'-O-methyluridine-3'-phosphorothioate
  modified_base 2: mod_base = OTHER; note = 2'-O-methylguanosine-3'-phosphorothioate
  modified_base 3: mod_base = OTHER; note = 2'-O-methyluridine-3'-phosphate
  modified_base 4: mod_base = OTHER; note = 2'-O-methylguanosine-3'-phosphate
  modified_base 5: mod_base = OTHER; note = 2'-O-methylcytidine-3'-phosphate
  modified_base 6: mod_base = OTHER; note = 2'-O-methyladenosine-3'-phosphate
  modified_base 7: mod_base = OTHER; note = 2'-O-methylguanosine-3'-phosphate
  modified_base 8: mod_base = OTHER; note = 2'-O-methylcytidine-3'-phosphate
  modified_base 9: mod_base = OTHER; note = 2'-fluorouridine-3'-phosphate
  modified_base 10: mod_base = OTHER; note = 2'-fluoroguanosine-3'-phosphate
  modified_base 11: mod_base = OTHER; note = 2'-fluoroguanosine-3'-phosphate
  modified_base 12: mod_base = OTHER; note = 2'-O-methyladenosine-3'-phosphate
  modified_base 13: mod_base = OTHER; note = 2'-O-methyladenosine-3'-phosphate
  modified_base 14: mod_base = OTHER; note = 2'-O-methyluridine-3'-phosphate
  modified_base 15: mod_base = OTHER; note = 2'-O-methyluridine-3'-phosphate
  modified_base 16: mod_base = OTHER; note = 2'-O-methylcytidine-3'-phosphate
  modified_base 17: mod_base = OTHER; note = 2'-O-methyluridine-3'-phosphate
  modified_base 18: mod_base = OTHER; note = 2'-O-methyluridine-3'-phosphate
  modified_base 19: mod_base = OTHER; note = 2'-O-methyluridine-3'-phosphorothioate
  modified_base 20: mod_base = OTHER; note = 2'-O-methylcytidine-3'-phosphorothioate
  modified_base 21: mod_base = OTHER; note = 2'-O-methyladenosine-3'-phosphate
tgtgcagctggaattctttca

SEQ ID NO: 732 - RNA, 21 nt, synthetic construct
  source 1..21: mol_type = other RNA
  modified_base 1: mod_base = OTHER; note = 2'-O-methyladenosine-3'-phosphorothioate
  modified_base 2: mod_base = OTHER; note = 2'-O-methyladenosine-3'-phosphorothioate
  modified_base 3: mod_base = OTHER; note = 2'-O-methyluridine-3'-phosphate
  modified_base 4: mod_base = OTHER; note = 2'-O-methyluridine-3'-phosphate
  modified_base 5: mod_base = OTHER; note = 2'-O-methylcytidine-3'-phosphate
  modified_base 6: mod_base = OTHER; note = 2'-O-methyluridine-3'-phosphate
  modified_base 7: mod_base = OTHER; note = 2'-fluorouridine-3'-phosphate
  modified_base 8: mod_base = OTHER; note = 2'-O-methyluridine-3'-phosphate
  modified_base 9: mod_base = OTHER; note = 2'-fluorocytidine-3'-phosphate
  modified_base 10: mod_base = OTHER; note = 2'-fluorouridine-3'-phosphate
  modified_base 11: mod_base = OTHER; note = 2'-fluoroadenosine-3'-phosphate
  modified_base 12: mod_base = OTHER; note = 2'-O-methyladenosine-3'-phosphate
  modified_base 13: mod_base = OTHER; note = 2'-O-methylcytidine-3'-phosphate
  modified_base 14: mod_base = OTHER; note = 2'-O-methylcytidine-3'-phosphate
  modified_base 15: mod_base = OTHER; note = 2'-O-methyluridine-3'-phosphate
  modified_base 16: mod_base = OTHER; note = 2'-O-methylcytidine-3'-phosphate
  modified_base 17: mod_base = OTHER; note = 2'-O-methyladenosine-3'-phosphate
  modified_base 18: mod_base = OTHER; note = 2'-O-methylcytidine-3'-phosphate
  modified_base 19: mod_base = OTHER; note = 2'-O-methyluridine-3'-phosphorothioate
  modified_base 20: mod_base = OTHER; note = 2'-O-methyluridine-3'-phosphorothioate
  modified_base 21: mod_base = OTHER; note = 2'-O-methyladenosine-3'-phosphate
aattctttctaacctcactta

SEQ ID NO: 733 - RNA, 21 nt, synthetic construct
  source 1..21: mol_type = other RNA
  modified_base 1: mod_base = OTHER; note = 2'-O-methyluridine-3'-phosphorothioate
  modified_base 2: mod_base = OTHER; note = 2'-O-methyluridine-3'-phosphorothioate
  modified_base 3: mod_base = OTHER; note = 2'-O-methylcytidine-3'-phosphate
  modified_base 4: mod_base = OTHER; note = 2'-O-methyluridine-3'-phosphate
  modified_base 5: mod_base = OTHER; note = 2'-O-methyluridine-3'-phosphate
  modified_base 6: mod_base = OTHER; note = 2'-O-methyluridine-3'-phosphate
  modified_base 7: mod_base = OTHER; note = 2'-O-methylcytidine-3'-phosphate
  modified_base 8: mod_base = OTHER; note = 2'-O-methyluridine-3'-phosphate
  modified_base 9: mod_base = OTHER; note = 2'-fluoroadenosine-3'-phosphate
  modified_base 10: mod_base = OTHER; note = 2'-fluoroadenosine-3'-phosphate
  modified_base 11: mod_base = OTHER; note = 2'-fluorocytidine-3'-phosphate
  modified_base 12: mod_base = OTHER; note = 2'-O-methylcytidine-3'-phosphate
  modified_base 13: mod_base = OTHER; note = 2'-O-methyluridine-3'-phosphate
  modified_base 14: mod_base = OTHER; note = 2'-O-methylcytidine-3'-phosphate
  modified_base 15: mod_base = OTHER; note = 2'-O-methyladenosine-3'-phosphate
  modified_base 16: mod_base = OTHER; note = 2'-O-methylcytidine-3'-phosphate
  modified_base 17: mod_base = OTHER; note = 2'-O-methyluridine-3'-phosphate
  modified_base 18: mod_base = OTHER; note = 2'-O-methyluridine-3'-phosphate
  modified_base 19: mod_base = OTHER; note = 2'-O-methylguanosine-3'-phosphorothioate
  modified_base 20: mod_base = OTHER; note = 2'-O-methylcytidine-3'-phosphorothioate
  modified_base 21: mod_base = OTHER; note = 2'-O-methyladenosine-3'-phosphate
ttctttctaacctcacttgca

SEQ ID NO: 734 - RNA, 21 nt, synthetic construct
  source 1..21: mol_type = other RNA
  modified_base 1: mod_base = OTHER; note = 2'-O-methylcytidine-3'-phosphorothioate
  modified_base 2: mod_base = OTHER; note = 2'-O-methyluridine-3'-phosphorothioate
  modified_base 3: mod_base = OTHER; note = 2'-O-methyluridine-3'-phosphate
  modified_base 4: mod_base = OTHER; note = 2'-O-methyluridine-3'-phosphate
  modified_base 5: mod_base = OTHER; note = 2'-O-methylcytidine-3'-phosphate
  modified_base 6: mod_base = OTHER; note = 2'-O-methyluridine-3'-phosphate
  modified_base 7: mod_base = OTHER; note = 2'-fluoroadenosine-3'-phosphate
  modified_base 8: mod_base = OTHER; note = 2'-O-methyladenosine-3'-phosphate
  modified_base 9: mod_base = OTHER; note = 2'-fluorocytidine-3'-phosphate
  modified_base 10: mod_base = OTHER; note = 2'-fluorocytidine-3'-phosphate
  modified_base 11: mod_base = OTHER; note = 2'-fluorouridine-3'-phosphate
  modified_base 12: mod_base = OTHER; note = 2'-O-methylcytidine-3'-phosphate
  modified_base 13: mod_base = OTHER; note = 2'-O-methyladenosine-3'-phosphate
  modified_base 14: mod_base = OTHER; note = 2'-O-methylcytidine-3'-phosphate
  modified_base 15: mod_base = OTHER; note = 2'-O-methyluridine-3'-phosphate
  modified_base 16: mod_base = OTHER; note = 2'-O-methyluridine-3'-phosphate
  modified_base 17: mod_base = OTHER; note = 2'-O-methylguanosine-3'-phosphate
  modified_base 18: mod_base = OTHER; note = 2'-O-methylcytidine-3'-phosphate
  modified_base 19: mod_base = OTHER; note = 2'-O-methyladenosine-3'-phosphorothioate
  modified_base 20: mod_base = OTHER; note = 2'-O-methyladenosine-3'-phosphorothioate
  modified_base 21: mod_base = OTHER; note = 2'-O-methyladenosine-3'-phosphate
ctttctaacctcacttgcaaa

SEQ ID NO: 735 - RNA, 21 nt, synthetic construct
  source 1..21: mol_type = other RNA
  modified_base 1: mod_base = OTHER; note = 2'-O-methyluridine-3'-phosphorothioate
  modified_base 2: mod_base = OTHER; note = 2'-O-methyluridine-3'-phosphorothioate
  modified_base 3: mod_base = OTHER; note = 2'-O-methyluridine-3'-phosphate
  modified_base 4: mod_base = OTHER; note = 2'-O-methylcytidine-3'-phosphate
  modified_base 5: mod_base = OTHER; note = 2'-O-methyluridine-3'-phosphate
  modified_base 6: mod_base = OTHER; note = 2'-O-methyladenosine-3'-phosphate
  modified_base 7: mod_base = OTHER; note = 2'-fluoroadenosine-3'-phosphate
  modified_base 8: mod_base = OTHER; note = 2'-O-methylcytidine-3'-phosphate
  modified_base 9: mod_base = OTHER; note = 2'-fluorocytidine-3'-phosphate
  modified_base 10: mod_base = OTHER; note = 2'-fluorouridine-3'-phosphate
  modified_base 11: mod_base = OTHER; note = 2'-fluorocytidine-3'-phosphate
  modified_base 12: mod_base = OTHER; note = 2'-O-methyladenosine-3'-phosphate
  modified_base 13: mod_base = OTHER; note = 2'-O-methylcytidine-3'-phosphate
  modified_base 14: mod_base = OTHER; note = 2'-O-methyluridine-3'-phosphate
  modified_base 15: mod_base = OTHER; note = 2'-O-methyluridine-3'-phosphate
  modified_base 16: mod_base = OTHER; note = 2'-O-methylguanosine-3'-phosphate
  modified_base 17: mod_base = OTHER; note = 2'-O-methylcytidine-3'-phosphate
  modified_base 18: mod_base = OTHER; note = 2'-O-methyladenosine-3'-phosphate
  modified_base 19: mod_base = OTHER; note = 2'-O-methyladenosine-3'-phosphorothioate
  modified_base 20: mod_base = OTHER; note = 2'-O-methyluridine-3'-phosphorothioate
  modified_base 21: mod_base = OTHER; note = 2'-O-methyladenosine-3'-phosphate
tttctaacctcacttgcaata

SEQ ID NO: 736 - RNA, 21 nt, synthetic construct
  source 1..21: mol_type = other RNA
  modified_base 1: mod_base = OTHER; note = 2'-O-methylcytidine-3'-phosphorothioate
  modified_base 2: mod_base = OTHER; note = 2'-O-methyluridine-3'-phosphorothioate
  modified_base 3: mod_base = OTHER; note = 2'-O-methyladenosine-3'-phosphate
  modified_base 4: mod_base = OTHER; note = 2'-O-methyladenosine-3'-phosphate
  modified_base 5: mod_base = OTHER; note = 2'-O-methylcytidine-3'-phosphate
  modified_base 6: mod_base = OTHER; note = 2'-O-methylcytidine-3'-phosphate
  modified_base 7: mod_base = OTHER; note = 2'-O-methyluridine-3'-phosphate
  modified_base 8: mod_base = OTHER; note = 2'-O-methylcytidine-3'-phosphate
  modified_base 9: mod_base = OTHER; note = 2'-fluoroadenosine-3'-phosphate
  modified_base 10: mod_base = OTHER; note = 2'-fluorocytidine-3'-phosphate
  modified_base 11: mod_base = OTHER; note = 2'-fluorouridine-3'-phosphate
  modified_base 12: mod_base = OTHER; note = 2'-O-methyluridine-3'-phosphate
  modified_base 13: mod_base = OTHER; note = 2'-O-methylguanosine-3'-phosphate
  modified_base 14: mod_base = OTHER; note = 2'-O-methylcytidine-3'-phosphate
  modified_base 15: mod_base = OTHER; note = 2'-O-methyladenosine-3'-phosphate
  modified_base 16: mod_base = OTHER; note = 2'-O-methyladenosine-3'-phosphate
  modified_base 17: mod_base = OTHER; note = 2'-O-methyluridine-3'-phosphate
  modified_base 18: mod_base = OTHER; note = 2'-O-methyladenosine-3'-phosphate
  modified_base 19: mod_base = OTHER; note = 2'-O-methyladenosine-3'-phosphorothioate
  modified_base 20: mod_base = OTHER; note = 2'-O-methyluridine-3'-phosphorothioate
  modified_base 21: mod_base = OTHER; note = 2'-O-methyladenosine-3'-phosphate
ctaacctcacttgcaataata

SEQ ID NO: 737 - RNA, 21 nt, synthetic construct
  source 1..21: mol_type = other RNA
  modified_base 1: mod_base = OTHER; note = 2'-O-methyluridine-3'-phosphorothioate
  modified_base 2: mod_base = OTHER; note = 2'-O-methyladenosine-3'-phosphorothioate
  modified_base 3: mod_base = OTHER; note = 2'-O-methyladenosine-3'-phosphate
  modified_base 4: mod_base = OTHER; note = 2'-O-methylcytidine-3'-phosphate
  modified_base 5: mod_base = OTHER; note = 2'-O-methylcytidine-3'-phosphate
  modified_base 6: mod_base = OTHER; note = 2'-O-methyluridine-3'-phosphate
  modified_base 7: mod_base = OTHER; note = 2'-O-methylcytidine-3'-phosphate
  modified_base 8: mod_base = OTHER; note = 2'-O-methyladenosine-3'-phosphate
  modified_base 9: mod_base = OTHER; note = 2'-fluorocytidine-3'-phosphate
  modified_base 10: mod_base = OTHER; note = 2'-fluorouridine-3'-phosphate
  modified_base 11: mod_base = OTHER; note = 2'-fluorouridine-3'-phosphate
  modified_base 12: mod_base = OTHER; note = 2'-O-methylguanosine-3'-phosphate
  modified_base 13: mod_base = OTHER; note = 2'-O-methylcytidine-3'-phosphate
  modified_base 14: mod_base = OTHER; note = 2'-O-methyladenosine-3'-phosphate
  modified_base 15: mod_base = OTHER; note = 2'-O-methyladenosine-3'-phosphate
  modified_base 16: mod_base = OTHER; note = 2'-O-methyluridine-3'-phosphate
  modified_base 17: mod_base = OTHER; note = 2'-O-methyladenosine-3'-phosphate
  modified_base 18: mod_base = OTHER; note = 2'-O-methyladenosine-3'-phosphate
  modified_base 19: mod_base = OTHER; note = 2'-O-methyluridine-3'-phosphorothioate
  modified_base 20: mod_base = OTHER; note = 2'-O-methyluridine-3'-phosphorothioate
  modified_base 21: mod_base = OTHER; note = 2'-O-methyladenosine-3'-phosphate
taacctcacttgcaataatta

SEQ ID NO: 738 - RNA, 21 nt, synthetic construct
  source 1..21: mol_type = other RNA
  modified_base 1: mod_base = OTHER; note = 2'-O-methyladenosine-3'-phosphorothioate
  modified_base 2: mod_base = OTHER; note = 2'-O-methyladenosine-3'-phosphorothioate
  modified_base 3: mod_base = OTHER; note = 2'-O-methylcytidine-3'-phosphate
  modified_base 4: mod_base = OTHER; note = 2'-O-methylcytidine-3'-phosphate
  modified_base 5: mod_base = OTHER; note = 2'-O-methyluridine-3'-phosphate
  modified_base 6: mod_base = OTHER; note = 2'-O-methylcytidine-3'-phosphate
  modified_base 7: mod_base = OTHER; note = 2'-O-methyladenosine-3'-phosphate
  modified_base 8: mod_base = OTHER; note = 2'-O-methylcytidine-3'-phosphate
  modified_base 9: mod_base = OTHER; note = 2'-fluorouridine-3'-phosphate
  modified_base 10: mod_base = OTHER; note = 2'-fluorouridine-3'-phosphate
  modified_base 11: mod_base = OTHER; note = 2'-fluoroguanosine-3'-phosphate
  modified_base 12: mod_base = OTHER; note = 2'-O-methylcytidine-3'-phosphate
  modified_base 13: mod_base = OTHER; note = 2'-O-methyladenosine-3'-phosphate
  modified_base 14: mod_base = OTHER; note = 2'-O-methyladenosine-3'-phosphate
  modified_base 15: mod_base = OTHER; note = 2'-O-methyluridine-3'-phosphate
  modified_base 16: mod_base = OTHER; note = 2'-O-methyladenosine-3'-phosphate
  modified_base 17: mod_base = OTHER; note = 2'-O-methyladenosine-3'-phosphate
  modified_base 18: mod_base = OTHER; note = 2'-O-methyluridine-3'-phosphate
  modified_base 19: mod_base = OTHER; note = 2'-O-methyluridine-3'-phosphorothioate
  modified_base 20: mod_base = OTHER; note = 2'-O-methyladenosine-3'-phosphorothioate
  modified_base 21: mod_base = OTHER; note = 2'-O-methyladenosine-3'-phosphate
aacctcacttgcaataattaa

SEQ ID NO: 739 - RNA, 21 nt, synthetic construct
  source 1..21: mol_type = other RNA
  modified_base 1: mod_base = OTHER; note = 2'-O-methyladenosine-3'-phosphorothioate
  modified_base 2: mod_base = OTHER; note = 2'-O-methylcytidine-3'-phosphorothioate
  modified_base 3: mod_base = OTHER; note = 2'-O-methylcytidine-3'-phosphate
  modified_base 4: mod_base = OTHER; note = 2'-O-methyluridine-3'-phosphate
  modified_base 5: mod_base = OTHER; note = 2'-O-methylcytidine-3'-phosphate
  modified_base 6: mod_base = OTHER; note = 2'-O-methyladenosine-3'-phosphate
  modified_base 7: mod_base = OTHER; note = 2'-O-methylcytidine-3'-phosphate
  modified_base 8: mod_base = OTHER; note = 2'-O-methyluridine-3'-phosphate
  modified_base 9: mod_base = OTHER; note = 2'-fluorouridine-3'-phosphate
  modified_base 10: mod_base = OTHER; note = 2'-fluoroguanosine-3'-phosphate
  modified_base 11: mod_base = OTHER; note = 2'-fluorocytidine-3'-phosphate
  modified_base 12: mod_base = OTHER; note = 2'-O-methyladenosine-3'-phosphate
  modified_base 13: mod_base = OTHER; note = 2'-O-methyladenosine-3'-phosphate
  modified_base 14: mod_base = OTHER; note = 2'-O-methyluridine-3'-phosphate
  modified_base 15: mod_base = OTHER; note = 2'-O-methyladenosine-3'-phosphate
  modified_base 16: mod_base = OTHER; note = 2'-O-methyladenosine-3'-phosphate
  modified_base 17: mod_base = OTHER; note = 2'-O-methyluridine-3'-phosphate
  modified_base 18: mod_base = OTHER; note = 2'-O-methyluridine-3'-phosphate
  modified_base 19: mod_base = OTHER; note = 2'-O-methyladenosine-3'-phosphorothioate
  modified_base 20: mod_base = OTHER; note = 2'-O-methyluridine-3'-phosphorothioate
  modified_base 21: mod_base = OTHER; note = 2'-O-methyladenosine-3'-phosphate
acctcacttgcaataattata

SEQ ID NO: 740 - RNA, 21 nt, synthetic construct
  source 1..21: mol_type = other RNA
  modified_base 1: mod_base = OTHER; note = 2'-O-methylcytidine-3'-phosphorothioate
  modified_base 2: mod_base = OTHER; note = 2'-O-methylcytidine-3'-phosphorothioate
  modified_base 3: mod_base = OTHER; note = 2'-O-methyluridine-3'-phosphate
  modified_base 4: mod_base = OTHER; note = 2'-O-methylcytidine-3'-phosphate
  modified_base 5: mod_base = OTHER; note = 2'-O-methyladenosine-3'-phosphate
  modified_base 6: mod_base = OTHER; note = 2'-O-methylcytidine-3'-phosphate
  modified_base 7: mod_base = OTHER; note = 2'-O-methyluridine-3'-phosphate
  modified_base 8: mod_base = OTHER; note = 2'-O-methyluridine-3'-phosphate
  modified_base 9: mod_base = OTHER; note = 2'-fluoroguanosine-3'-phosphate
  modified_base 10: mod_base = OTHER; note = 2'-fluorocytidine-3'-phosphate
  modified_base 11: mod_base = OTHER; note = 2'-fluoroadenosine-3'-phosphate
  modified_base 12: mod_base = OTHER; note = 2'-O-methyladenosine-3'-phosphate
  modified_base 13: mod_base = OTHER; note = 2'-O-methyluridine-3'-phosphate
  modified_base 14: mod_base = OTHER; note = 2'-O-methyladenosine-3'-phosphate
  modified_base 15: mod_base = OTHER; note = 2'-O-methyladenosine-3'-phosphate
  modified_base 16: mod_base = OTHER; note = 2'-O-methyluridine-3'-phosphate
  modified_base 17: mod_base = OTHER; note = 2'-O-methyluridine-3'-phosphate
  modified_base 18: mod_base = OTHER; note = 2'-O-methyladenosine-3'-phosphate
  modified_base 19: mod_base = OTHER; note = 2'-O-methyluridine-3'-phosphorothioate
  modified_base 20: mod_base = OTHER; note = 2'-O-methyladenosine-3'-phosphorothioate
  modified_base 21: mod_base = OTHER; note = 2'-O-methyladenosine-3'-phosphate
cctcacttgcaataattataa

SEQ ID NO: 741 - RNA, 21 nt, synthetic construct
  source 1..21: mol_type = other RNA
  modified_base 1: mod_base = OTHER; note = 2'-O-methylcytidine-3'-phosphorothioate
  modified_base 2: mod_base = OTHER; note = 2'-O-methyluridine-3'-phosphorothioate
  modified_base 3: mod_base = OTHER; note = 2'-O-methylcytidine-3'-phosphate
  modified_base 4: mod_base = OTHER; note = 2'-O-methyladenosine-3'-phosphate
  modified_base 5: mod_base = OTHER; note = 2'-O-methylcytidine-3'-phosphate
  modified_base 6: mod_base = OTHER; note = 2'-O-methyluridine-3'-phosphate
  modified_base 7: mod_base = OTHER; note = 2'-fluorouridine-3'-phosphate
  modified_base 8: mod_base = OTHER; note = 2'-O-methylguanosine-3'-phosphate
  modified_base 9: mod_base = OTHER; note = 2'-fluorocytidine-3'-phosphate
  modified_base 10: mod_base = OTHER; note = 2'-fluoroadenosine-3'-phosphate
  modified_base 11: mod_base = OTHER; note = 2'-fluoroadenosine-3'-phosphate
  modified_base 12: mod_base = OTHER; note = 2'-O-methyluridine-3'-phosphate
  modified_base 13: mod_base = OTHER; note = 2'-O-methyladenosine-3'-phosphate
  modified_base 14: mod_base = OTHER; note = 2'-O-methyladenosine-3'-phosphate
  modified_base 15: mod_base = OTHER; note = 2'-O-methyluridine-3'-phosphate
  modified_base 16: mod_base = OTHER; note = 2'-O-methyluridine-3'-phosphate
  modified_base 17: mod_base = OTHER; note = 2'-O-methyladenosine-3'-phosphate
  modified_base 18: mod_base = OTHER; note = 2'-O-methyluridine-3'-phosphate
  modified_base 19: mod_base = OTHER; note = 2'-O-methyladenosine-3'-phosphorothioate
  modified_base 20: mod_base = OTHER; note = 2'-O-methyladenosine-3'-phosphorothioate
  modified_base 21: mod_base = OTHER; note = 2'-O-methyladenosine-3'-phosphate
ctcacttgcaataattataaa

SEQ ID NO: 742 - RNA, 21 nt, synthetic construct
  source 1..21: mol_type = other RNA
  modified_base 1: mod_base = OTHER; note = 2'-O-methylcytidine-3'-phosphorothioate
  modified_base 2: mod_base = OTHER; note = 2'-O-methyluridine-3'-phosphorothioate
  modified_base 3: mod_base = OTHER; note = 2'-O-methylcytidine-3'-phosphate
  modified_base 4: mod_base = OTHER; note = 2'-O-methyladenosine-3'-phosphate
  modified_base 5: mod_base = OTHER; note = 2'-O-methylcytidine-3'-phosphate
  modified_base 6: mod_base = OTHER; note = 2'-O-methyluridine-3'-phosphate
  modified_base 7: mod_base = OTHER; note = 2'-O-methyluridine-3'-phosphate
  modified_base 8: mod_base = OTHER; note = 2'-O-methylguanosine-3'-phosphate
  modified_base 9: mod_base = OTHER; note = 2'-fluorocytidine-3'-phosphate
  modified_base 10: mod_base = OTHER; note = 2'-fluoroadenosine-3'-phosphate
  modified_base 11: mod_base = OTHER; note = 2'-fluoroadenosine-3'-phosphate
  modified_base 12: mod_base = OTHER; note = 2'-O-methyluridine-3'-phosphate
  modified_base 13: mod_base = OTHER; note = 2'-O-methyladenosine-3'-phosphate
  modified_base 14: mod_base = OTHER; note = 2'-O-methyladenosine-3'-phosphate
  modified_base 15: mod_base = OTHER; note = 2'-O-methyluridine-3'-phosphate
  modified_base 16: mod_base = OTHER; note = 2'-O-methyluridine-3'-phosphate
  modified_base 17: mod_base = OTHER; note = 2'-O-methyladenosine-3'-phosphate
  modified_base 18: mod_base = OTHER; note = 2'-O-methyluridine-3'-phosphate
  modified_base 19: mod_base = OTHER; note = 2'-O-methyladenosine-3'-phosphorothioate
  modified_base 20: mod_base = OTHER; note = 2'-O-methyladenosine-3'-phosphorothioate
  modified_base 21: mod_base = OTHER; note = 2'-O-methyladenosine-3'-phosphate
ctcacttgcaataattataaa

SEQ ID NO: 743 - RNA, 21 nt, synthetic construct
  source 1..21: mol_type = other RNA
  modified_base 1: mod_base = OTHER; note = 2'-O-methyluridine-3'-phosphorothioate
  modified_base 2: mod_base = OTHER; note = 2'-O-methylcytidine-3'-phosphorothioate
  modified_base 3: mod_base = OTHER; note = 2'-O-methyladenosine-3'-phosphate
  modified_base 4: mod_base = OTHER; note = 2'-O-methylcytidine-3'-phosphate
  modified_base 5: mod_base = OTHER; note = 2'-O-methyluridine-3'-phosphate
  modified_base 6: mod_base = OTHER; note = 2'-O-methyluridine-3'-phosphate
  modified_base 7: mod_base = OTHER; note = 2'-O-methylguanosine-3'-phosphate
  modified_base 8: mod_base = OTHER; note = 2'-O-methylcytidine-3'-phosphate
  modified_base 9: mod_base = OTHER; note = 2'-fluoroadenosine-3'-phosphate
  modified_base 10: mod_base = OTHER; note = 2'-fluoroadenosine-3'-phosphate
  modified_base 11: mod_base = OTHER; note = 2'-fluorouridine-3'-phosphate
  modified_base 12: mod_base = OTHER; note = 2'-O-methyladenosine-3'-phosphate
  modified_base 13: mod_base = OTHER; note = 2'-O-methyladenosine-3'-phosphate
  modified_base 14: mod_base = OTHER; note = 2'-O-methyluridine-3'-phosphate
  modified_base 15: mod_base = OTHER; note = 2'-O-methyluridine-3'-phosphate
  modified_base 16: mod_base = OTHER; note = 2'-O-methyladenosine-3'-phosphate
  modified_base 17: mod_base = OTHER; note = 2'-O-methyluridine-3'-phosphate
  modified_base 18: mod_base = OTHER; note = 2'-O-methyladenosine-3'-phosphate
  modified_base 19: mod_base = OTHER; note = 2'-O-methyladenosine-3'-phosphorothioate
  modified_base 20: mod_base = OTHER; note = 2'-O-methylguanosine-3'-phosphorothioate
  modified_base 21: mod_base = OTHER; note = 2'-O-methyladenosine-3'-phosphate
tcacttgcaataattataaga

SEQ ID NO: 744 - RNA, 21 nt, synthetic construct
  source 1..21: mol_type = other RNA
  modified_base 1: mod_base = OTHER; note = 2'-O-methylcytidine-3'-phosphorothioate
  modified_base 2: mod_base = OTHER; note = 2'-O-methyladenosine-3'-phosphorothioate
  modified_base 3: mod_base = OTHER; note = 2'-O-methylcytidine-3'-phosphate
  modified_base 4: mod_base = OTHER; note = 2'-O-methyluridine-3'-phosphate
  modified_base 5: mod_base = OTHER; note = 2'-O-methyluridine-3'-phosphate
  modified_base 6: mod_base = OTHER; note = 2'-O-methylguanosine-3'-phosphate
  modified_base 7: mod_base = OTHER; note = 2'-O-methylcytidine-3'-phosphate
  modified_base 8: mod_base = OTHER; note = 2'-O-methyladenosine-3'-phosphate
  modified_base 9: mod_base = OTHER; note = 2'-fluoroadenosine-3'-phosphate
  modified_base 10: mod_base = OTHER; note = 2'-fluorouridine-3'-phosphate
  modified_base 11: mod_base = OTHER; note = 2'-fluoroadenosine-3'-phosphate
  modified_base 12: mod_base = OTHER; note = 2'-O-methyladenosine-3'-phosphate
  modified_base 13: mod_base = OTHER; note = 2'-O-methyluridine-3'-phosphate
  modified_base 14: mod_base = OTHER; note = 2'-O-methyluridine-3'-phosphate
  modified_base 15: mod_base = OTHER; note = 2'-O-methyladenosine-3'-phosphate
  modified_base 16: mod_base = OTHER; note = 2'-O-methyluridine-3'-phosphate
  modified_base 17: mod_base = OTHER; note = 2'-O-methyladenosine-3'-phosphate
  modified_base 18: mod_base = OTHER; note = 2'-O-methyladenosine-3'-phosphate
  modified_base 19: mod_base = OTHER; note = 2'-O-methylguanosine-3'-phosphorothioate
  modified_base 20: mod_base = OTHER; note = 2'-O-methyladenosine-3'-phosphorothioate
  modified_base 21: mod_base = OTHER; note = 2'-O-methyladenosine-3'-phosphate
cacttgcaataattataagaa

SEQ ID NO: 745 - RNA, 21 nt, synthetic construct
  source 1..21: mol_type = other RNA
  modified_base 1: mod_base = OTHER; note = 2'-O-methylcytidine-3'-phosphorothioate
  modified_base 2: mod_base = OTHER; note = 2'-O-methyladenosine-3'-phosphorothioate
  modified_base 3: mod_base = OTHER; note = 2'-O-methyladenosine-3'-phosphate
  modified_base 4: mod_base = OTHER; note = 2'-O-methylguanosine-3'-phosphate
  modified_base 5: mod_base = OTHER; note = 2'-O-methyluridine-3'-phosphate
  modified_base 6: mod_base = OTHER; note = 2'-O-methylguanosine-3'-phosphate
  modified_base 7: mod_base = OTHER; note = 2'-fluoroguanosine-3'-phosphate
  modified_base 8: mod_base = OTHER; note = 2'-O-methylguanosine-3'-phosphate
  modified_base 9: mod_base = OTHER; note = 2'-fluorouridine-3'-phosphate
  modified_base 10: mod_base = OTHER; note = 2'-fluoroguanosine-3'-phosphate
  modified_base 11: mod_base = OTHER; note = 2'-fluoroguanosine-3'-phosphate
  modified_base 12: mod_base = OTHER; note = 2'-O-methyluridine-3'-phosphate
  modified_base 13: mod_base = OTHER; note = 2'-O-methyladenosine-3'-phosphate
  modified_base 14: mod_base = OTHER; note = 2'-O-methyluridine-3'-phosphate
  modified_base 15: mod_base = OTHER; note = 2'-O-methyladenosine-3'-phosphate
  modified_base 16: mod_base = OTHER; note = 2'-O-methylguanosine-3'-phosphate
  modified_base 17: mod_base = OTHER; note = 2'-O-methyladenosine-3'-phosphate
  modified_base 18: mod_base = OTHER; note = 2'-O-methylguanosine-3'-phosphate
  modified_base 19: mod_base = OTHER; note = 2'-O-methylguanosine-3'-phosphorothioate
  modified_base 20: mod_base = OTHER; note = 2'-O-methylcytidine-3'-phosphorothioate
  modified_base 21: mod_base = OTHER; note = 2'-O-methyladenosine-3'-phosphate
caagtgggtggtatagaggca

SEQ ID NO: 746 - RNA, 21 nt, synthetic construct
  source 1..21: mol_type = other RNA
  modified_base 1: mod_base = OTHER; note = 2'-O-methylguanosine-3'-phosphorothioate
  modified_base 2: mod_base = OTHER; note = 2'-O-methylcytidine-3'-phosphorothioate
  modified_base 3: mod_base = OTHER; note = 2'-O-methyluridine-3'-phosphate
  modified_base 4: mod_base = OTHER; note = 2'-O-methylcytidine-3'-phosphate
  modified_base 5: mod_base = OTHER; note = 2'-O-methyluridine-3'-phosphate
  modified_base 6: mod_base = OTHER; note = 2'-O-methyluridine-3'-phosphate
  modified_base 7: mod_base = OTHER; note = 2'-fluoroguanosine-3'-phosphate
  modified_base 8: mod_base = OTHER; note = 2'-O-methyluridine-3'-phosphate
  modified_base 9: mod_base = OTHER; note = 2'-fluoroguanosine-3'-phosphate
  modified_base 10: mod_base = OTHER; note = 2'-fluorocytidine-3'-phosphate
  modified_base 11: mod_base = OTHER; note = 2'-fluoroguanosine-3'-phosphate
  modified_base 12: mod_base = OTHER; note = 2'-O-methyluridine-3'-phosphate
  modified_base 13: mod_base = OTHER; note = 2'-O-methyladenosine-3'-phosphate
  modified_base 14: mod_base = OTHER; note = 2'-O-methylcytidine-3'-phosphate
  modified_base 15: mod_base = OTHER; note = 2'-O-methyluridine-3'-phosphate
  modified_base 16: mod_base = OTHER; note = 2'-O-methylguanosine-3'-phosphate
  modified_base 17: mod_base = OTHER; note = 2'-O-methyluridine-3'-phosphate
  modified_base 18: mod_base = OTHER; note = 2'-O-methylcytidine-3'-phosphate
  modified_base 19: mod_base = OTHER; note = 2'-O-methylcytidine-3'-phosphorothioate
  modified_base 20: mod_base = OTHER; note = 2'-O-methyluridine-3'-phosphorothioate
  modified_base 21: mod_base = OTHER; note = 2'-O-methyladenosine-3'-phosphate
gctcttgtgcgtactgtccta

SEQ ID NO: 747 - RNA, 21 nt, synthetic construct
  source 1..21: mol_type = other RNA
  modified_base 1: mod_base = OTHER; note = 2'-O-methylcytidine-3'-phosphorothioate
  modified_base 2: mod_base = OTHER; note = 2'-O-methylcytidine-3'-phosphorothioate
  modified_base 3: mod_base = OTHER; note = 2'-O-methyluridine-3'-phosphate
  modified_base 4: mod_base = OTHER; note = 2'-O-methylguanosine-3'-phosphate
  modified_base 5: mod_base = OTHER; note = 2'-O-methylcytidine-3'-phosphate
  modified_base 6: mod_base = OTHER; note = 2'-O-methylcytidine-3'-phosphate
  modified_base 7: mod_base = OTHER; note = 2'-O-methyladenosine-3'-phosphate
  modified_base 8: mod_base = OTHER; note = 2'-O-methyluridine-3'-phosphate
  modified_base 9: mod_base = OTHER; note = 2'-fluorocytidine-3'-phosphate
  modified_base 10: mod_base = OTHER; note = 2'-fluorouridine-3'-phosphate
  modified_base 11: mod_base = OTHER; note = 2'-fluoroguanosine-3'-phosphate
  modified_base 12: mod_base = OTHER; note = 2'-O-methyluridine-3'-phosphate
  modified_base 13: mod_base = OTHER; note = 2'-O-methylguanosine-3'-phosphate
  modified_base 14: mod_base = OTHER; note = 2'-O-methylcytidine-3'-phosphate
  modified_base 15: mod_base = OTHER; note = 2'-O-methyluridine-3'-phosphate
  modified_base 16: mod_base = OTHER; note = 2'-O-methylcytidine-3'-phosphate
  modified_base 17: mod_base = OTHER; note = 2'-O-methyluridine-3'-phosphate
  modified_base 18: mod_base = OTHER; note = 2'-O-methyluridine-3'-phosphate
  modified_base 19: mod_base = OTHER; note = 2'-O-methylcytidine-3'-phosphorothioate
  modified_base 20: mod_base = OTHER; note = 2'-O-methylguanosine-3'-phosphorothioate
  modified_base 21: mod_base = OTHER; note = 2'-O-methyladenosine-3'-phosphate
cctgccatctgtgctcttcga

SEQ ID NO: 748 - RNA, 21 nt, synthetic construct
  source 1..21: mol_type = other RNA
  modified_base 1: mod_base = OTHER; note = 2'-O-methylcytidine-3'-phosphorothioate
  modified_base 2: mod_base = OTHER; note = 2'-O-methyluridine-3'-phosphorothioate
  modified_base 3: mod_base = OTHER; note = 2'-O-methylguanosine-3'-phosphate
  modified_base 4: mod_base = OTHER; note = 2'-O-methylcytidine-3'-phosphate
  modified_base 5: mod_base = OTHER; note = 2'-O-methylcytidine-3'-phosphate
  modified_base 6: mod_base = OTHER; note = 2'-O-methyladenosine-3'-phosphate
  modified_base 7: mod_base = OTHER; note = 2'-O-methyluridine-3'-phosphate
  modified_base 8: mod_base = OTHER; note = 2'-O-methylcytidine-3'-phosphate
  modified_base 9: mod_base = OTHER; note = 2'-fluorouridine-3'-phosphate
  modified_base 10: mod_base = OTHER; note = 2'-fluoroguanosine-3'-phosphate
  modified_base 11: mod_base = OTHER; note = 2'-fluorouridine-3'-phosphate
  modified_base 12: mod_base = OTHER; note = 2'-O-methylguanosine-3'-phosphate
  modified_base 13: mod_base = OTHER; note = 2'-O-methylcytidine-3'-phosphate
  modified_base 14: mod_base = OTHER; note = 2'-O-methyluridine-3'-phosphate
  modified_base 15: mod_base = OTHER; note = 2'-O-methylcytidine-3'-phosphate
  modified_base 16: mod_base = OTHER; note = 2'-O-methyluridine-3'-phosphate
  modified_base 17: mod_base = OTHER; note = 2'-O-methyluridine-3'-phosphate
  modified_base 18: mod_base = OTHER; note = 2'-O-methylcytidine-3'-phosphate
  modified_base 19: mod_base = OTHER; note = 2'-O-methylguanosine-3'-phosphorothioate
  modified_base 20: mod_base = OTHER; note = 2'-O-methyluridine-3'-phosphorothioate
  modified_base 21: mod_base = OTHER; note = 2'-O-methyladenosine-3'-phosphate
ctgccatctgtgctcttcgta

SEQ ID NO: 749 - RNA, 21 nt, synthetic construct
  source 1..21: mol_type = other RNA
  modified_base 1: mod_base = OTHER; note = 2'-O-methyluridine-3'-phosphorothioate
  modified_base 2: mod_base = OTHER; note = 2'-O-methylguanosine-3'-phosphorothioate
  modified_base 3: mod_base = OTHER; note = 2'-O-methylcytidine-3'-phosphate
  modified_base 4: mod_base = OTHER; note = 2'-O-methylcytidine-3'-phosphate
  modified_base 5: mod_base = OTHER; note = 2'-O-methyladenosine-3'-phosphate
  modified_base 6: mod_base = OTHER; note = 2'-O-methyluridine-3'-phosphate
  modified_base 7: mod_base = OTHER; note = 2'-O-methylcytidine-3'-phosphate
  modified_base 8: mod_base = OTHER; note = 2'-O-methyluridine-3'-phosphate
  modified_base 9: mod_base = OTHER; note = 2'-fluoroguanosine-3'-phosphate
  modified_base 10: mod_base = OTHER; note = 2'-fluorouridine-3'-phosphate
  modified_base 11: mod_base = OTHER; note = 2'-fluoroguanosine-3'-phosphate
  modified_base 12: mod_base = OTHER; note = 2'-O-methylcytidine-3'-phosphate
  modified_base 13: mod_base = OTHER; note = 2'-O-methyluridine-3'-phosphate
  modified_base 14: mod_base = OTHER; note = 2'-O-methylcytidine-3'-phosphate
  modified_base 15: mod_base = OTHER; note = 2'-O-methyluridine-3'-phosphate
  modified_base 16: mod_base = OTHER; note = 2'-O-methyluridine-3'-phosphate
  modified_base 17: mod_base = OTHER; note = 2'-O-methylcytidine-3'-phosphate
  modified_base 18: mod_base = OTHER; note = 2'-O-methylguanosine-3'-phosphate
  modified_base 19: mod_base = OTHER; note = 2'-O-methyluridine-3'-phosphorothioate
  modified_base 20: mod_base = OTHER; note = 2'-O-methylcytidine-3'-phosphorothioate
  modified_base 21: mod_base = OTHER; note = 2'-O-methyladenosine-3'-phosphate
tgccatctgtgctcttcgtca

SEQ ID NO: 750 - RNA, 21 nt, synthetic construct
  source 1..21: mol_type = other RNA
  modified_base 1: mod_base = OTHER; note = 2'-O-methylguanosine-3'-phosphorothioate
  modified_base 2: mod_base = OTHER; note = 2'-O-methylcytidine-3'-phosphorothioate
  modified_base 3: mod_base = OTHER; note = 2'-O-methylcytidine-3'-phosphate
  modified_base 4: mod_base = OTHER; note = 2'-O-methyladenosine-3'-phosphate
  modified_base 5: mod_base = OTHER; note = 2'-O-methyluridine-3'-phosphate
  modified_base 6: mod_base = OTHER; note = 2'-O-methylcytidine-3'-phosphate
  modified_base 7: mod_base = OTHER; note = 2'-O-methyluridine-3'-phosphate
  modified_base 8: mod_base = OTHER; note = 2'-O-methylguanosine-3'-phosphate
  modified_base 9: mod_base = OTHER; note = 2'-fluorouridine-3'-phosphate
  modified_base 10: mod_base = OTHER; note = 2'-fluoroguanosine-3'-phosphate
  modified_base 11: mod_base = OTHER; note = 2'-fluorocytidine-3'-phosphate
  modified_base 12: mod_base = OTHER; note = 2'-O-methyluridine-3'-phosphate
  modified_base 13: mod_base = OTHER; note = 2'-O-methylcytidine-3'-phosphate
  modified_base 14: mod_base = OTHER; note = 2'-O-methyluridine-3'-phosphate
  modified_base 15: mod_base = OTHER; note = 2'-O-methyluridine-3'-phosphate
  modified_base 16: mod_base = OTHER; note = 2'-O-methylcytidine-3'-phosphate
  modified_base 17: mod_base = OTHER; note = 2'-O-methylguanosine-3'-phosphate
  modified_base 18: mod_base = OTHER; note = 2'-O-methyluridine-3'-phosphate
  modified_base 19: mod_base = OTHER; note = 2'-O-methylcytidine-3'-phosphorothioate
  modified_base 20: mod_base = OTHER; note = 2'-O-methyladenosine-3'-phosphorothioate
  modified_base 21: mod_base = OTHER; note = 2'-O-methyladenosine-3'-phosphate
gccatctgtgctcttcgtcaa

SEQ ID NO: 751 - RNA, 21 nt, synthetic construct
  source 1..21: mol_type = other RNA
  modified_base 1: mod_base = OTHER; note = 2'-O-methylcytidine-3'-phosphorothioate
  modified_base 2: mod_base = OTHER; note = 2'-O-methylcytidine-3'-phosphorothioate
  modified_base 3: mod_base = OTHER; note = 2'-O-methyladenosine-3'-phosphate
  modified_base 4: mod_base = OTHER; note = 2'-O-methyluridine-3'-phosphate
  modified_base 5: mod_base = OTHER; note = 2'-O-methylcytidine-3'-phosphate
  modified_base 6: mod_base = OTHER; note = 2'-O-methyluridine-3'-phosphate
  modified_base 7: mod_base = OTHER; note = 2'-O-methylguanosine-3'-phosphate
  modified_base 8: mod_base = OTHER; note = 2'-O-methyluridine-3'-phosphate
  modified_base 9: mod_base = OTHER; note = 2'-fluoroguanosine-3'-phosphate
  modified_base 10: mod_base = OTHER; note = 2'-fluorocytidine-3'-phosphate
  modified_base 11: mod_base = OTHER; note = 2'-fluorouridine-3'-phosphate
  modified_base 12: mod_base = OTHER; note = 2'-O-methylcytidine-3'-phosphate
  modified_base 13: mod_base = OTHER; note = 2'-O-methyluridine-3'-phosphate
  modified_base 14: mod_base = OTHER; note = 2'-O-methyluridine-3'-phosphate
  modified_base 15: mod_base = OTHER; note = 2'-O-methylcytidine-3'-phosphate
  modified_base 16: mod_base = OTHER; note = 2'-O-methylguanosine-3'-phosphate
  modified_base 17: mod_base = OTHER; note = 2'-O-methyluridine-3'-phosphate
  modified_base 18: mod_base = OTHER; note = 2'-O-methylcytidine-3'-phosphate
  modified_base 19: mod_base = OTHER; note = 2'-O-methyladenosine-3'-phosphorothioate
  modified_base 20: mod_base = OTHER; note = 2'-O-methyluridine-3'-phosphorothioate
  modified_base 21: mod_base = OTHER; note = 2'-O-methyladenosine-3'-phosphate
ccatctgtgctcttcgtcata

SEQ ID NO: 752 - RNA, 21 nt, synthetic construct
  source 1..21: mol_type = other RNA
  modified_base 1: mod_base = OTHER; note = 2'-O-methyladenosine-3'-phosphorothioate
  modified_base 2: mod_base = OTHER; note = 2'-O-methyluridine-3'-phosphorothioate
  modified_base 3: mod_base = OTHER; note = 2'-O-methylcytidine-3'-phosphate
  modified_base 4: mod_base = OTHER; note = 2'-O-methyluridine-3'-phosphate
  modified_base 5: mod_base = OTHER; note = 2'-O-methylguanosine-3'-phosphate
  modified_base 6: mod_base = OTHER; note = 2'-O-methyluridine-3'-phosphate
  modified_base 7: mod_base = OTHER; note = 2'-fluoroguanosine-3'-phosphate
  modified_base 8: mod_base = OTHER; note = 2'-O-methylcytidine-3'-phosphate
  modified_base 9: mod_base = OTHER; note = 2'-fluorouridine-3'-phosphate
  modified_base 10: mod_base = OTHER; note = 2'-fluorocytidine-3'-phosphate
  modified_base 11: mod_base = OTHER; note = 2'-fluorouridine-3'-phosphate
  modified_base 12: mod_base = OTHER; note = 2'-O-methyluridine-3'-phosphate
  modified_base 13: mod_base = OTHER; note = 2'-O-methylcytidine-3'-phosphate
  modified_base 14: mod_base = OTHER; note = 2'-O-methylguanosine-3'-phosphate
  modified_base 15: mod_base = OTHER; note = 2'-O-methyluridine-3'-phosphate
  modified_base 16: mod_base = OTHER; note = 2'-O-methylcytidine-3'-phosphate
  modified_base 17: mod_base = OTHER; note = 2'-O-methyladenosine-3'-phosphate
  modified_base 18: mod_base = OTHER; note = 2'-O-methyluridine-3'-phosphate
  modified_base 19: mod_base = OTHER; note = 2'-O-methylcytidine-3'-phosphorothioate
  modified_base 20: mod_base = OTHER; note = 2'-O-methyluridine-3'-phosphorothioate
  modified_base 21: mod_base = OTHER; note = 2'-O-methyladenosine-3'-phosphate
atctgtgctcttcgtcatcta

SEQ ID NO: 753 - RNA, 21 nt, synthetic construct
  source 1..21: mol_type = other RNA
  modified_base 1: mod_base = OTHER; note = 2'-O-methyluridine-3'-phosphorothioate
  modified_base 2: mod_base = OTHER; note = 2'-O-methylcytidine-3'-phosphorothioate
  modified_base 3: mod_base = OTHER; note = 2'-O-methyluridine-3'-phosphate
  modified_base 4: mod_base = OTHER; note = 2'-O-methylguanosine-3'-phosphate
  modified_base 5: mod_base = OTHER; note = 2'-O-methyluridine-3'-phosphate
  modified_base 6: mod_base = OTHER; note = 2'-O-methylguanosine-3'-phosphate
  modified_base 7: mod_base = OTHER; note = 2'-O-methylcytidine-3'-phosphate
  modified_base 8: mod_base = OTHER; note = 2'-O-methyluridine-3'-phosphate
  modified_base 9: mod_base = OTHER; note = 2'-fluorocytidine-3'-phosphate
  modified_base 10: mod_base = OTHER; note = 2'-fluorouridine-3'-phosphate
  modified_base 11: mod_base = OTHER; note = 2'-fluorouridine-3'-phosphate
  modified_base 12: mod_base = OTHER; note = 2'-O-methylcytidine-3'-phosphate
  modified_base 13: mod_base = OTHER; note = 2'-O-methylguanosine-3'-phosphate
  modified_base 14: mod_base = OTHER; note = 2'-O-methyluridine-3'-phosphate
  modified_base 15: mod_base = OTHER; note = 2'-O-methylcytidine-3'-phosphate
  modified_base 16: mod_base = OTHER; note = 2'-O-methyladenosine-3'-phosphate
  modified_base 17: mod_base = OTHER; note = 2'-O-methyluridine-3'-phosphate
  modified_base 18: mod_base = OTHER; note = 2'-O-methylcytidine-3'-phosphate
  modified_base 19: mod_base = OTHER; note = 2'-O-methyluridine-3'-phosphorothioate
  modified_base 20: mod_base = OTHER; note = 2'-O-methylguanosine-3'-phosphorothioate
  modified_base 21: mod_base = OTHER; note = 2'-O-methyladenosine-3'-phosphate
tctgtgctcttcgtcatctga

SEQ ID NO: 754 - RNA, 21 nt, synthetic construct
  source 1..21: mol_type = other RNA
  modified_base 1: mod_base = OTHER; note = 2'-O-methylcytidine-3'-phosphorothioate
  modified_base 2: mod_base = OTHER; note = 2'-O-methyluridine-3'-phosphorothioate
  modified_base 3: mod_base = OTHER; note = 2'-O-methylguanosine-3'-phosphate
  modified_base 4: mod_base = OTHER; note = 2'-O-methyluridine-3'-phosphate
  modified_base 5: mod_base = OTHER; note = 2'-O-methylguanosine-3'-phosphate
  modified_base 6: mod_base = OTHER; note = 2'-O-methylcytidine-3'-phosphate
  modified_base 7: mod_base = OTHER; note = 2'-fluorouridine-3'-phosphate
  modified_base 8: mod_base = OTHER; note = 2'-O-methylcytidine-3'-phosphate
  modified_base 9: mod_base = OTHER; note = 2'-fluorouridine-3'-phosphate
  modified_base 10: mod_base = OTHER; note = 2'-fluorouridine-3'-phosphate
  modified_base 11: mod_base = OTHER; note = 2'-fluorocytidine-3'-phosphate
  modified_base 12: mod_base = OTHER; note = 2'-O-methylguanosine-3'-phosphate
  modified_base 13: mod_base = OTHER; note = 2'-O-methyluridine-3'-phosphate
  modified_base 14: mod_base = OTHER; note = 2'-O-methylcytidine-3'-phosphate
  modified_base 15: mod_base = OTHER; note = 2'-O-methyladenosine-3'-phosphate
  modified_base 16: mod_base = OTHER; note = 2'-O-methyluridine-3'-phosphate
  modified_base 17: mod_base = OTHER; note = 2'-O-methylcytidine-3'-phosphate
  modified_base 18: mod_base = OTHER; note = 2'-O-methyluridine-3'-phosphate
  modified_base 19: mod_base = OTHER; note = 2'-O-methylguanosine-3'-phosphorothioate
  modified_base 20: mod_base = OTHER; note = 2'-O-methyladenosine-3'-phosphorothioate
  modified_base 21: mod_base = OTHER; note = 2'-O-methyladenosine-3'-phosphate
ctgtgctcttcgtcatctgaa

SEQ ID NO: 755 - RNA, 21 nt, synthetic construct
  source 1..21: mol_type = other RNA
  modified_base 1: mod_base = OTHER; note = 2'-O-methyluridine-3'-phosphorothioate
  modified_base 2: mod_base = OTHER; note = 2'-O-methylguanosine-3'-phosphorothioate
  modified_base 3: mod_base = OTHER; note = 2'-O-methyluridine-3'-phosphate
  modified_base 4: mod_base = OTHER; note = 2'-O-methylguanosine-3'-phosphate
  modified_base 5: mod_base = OTHER; note = 2'-O-methylcytidine-3'-phosphate
  modified_base 6: mod_base = OTHER; note = 2'-O-methyluridine-3'-phosphate
  modified_base 7: mod_base = OTHER; note = 2'-fluorocytidine-3'-phosphate
  modified_base 8: mod_base = OTHER; note = 2'-O-methyluridine-3'-phosphate
  modified_base 9: mod_base = OTHER; note = 2'-fluorouridine-3'-phosphate
  modified_base 10: mod_base = OTHER; note = 2'-fluorocytidine-3'-phosphate
  modified_base 11: mod_base = OTHER; note = 2'-fluoroguanosine-3'-phosphate
  modified_base 12: mod_base = OTHER; note = 2'-O-methyluridine-3'-phosphate
  modified_base 13: mod_base = OTHER; note = 2'-O-methylcytidine-3'-phosphate
  modified_base 14: mod_base = OTHER; note = 2'-O-methyladenosine-3'-phosphate
  modified_base 15: mod_base = OTHER; note = 2'-O-methyluridine-3'-phosphate
  modified_base 16: mod_base = OTHER; note = 2'-O-methylcytidine-3'-phosphate
  modified_base 17: mod_base = OTHER; note = 2'-O-methyluridine-3'-phosphate
  modified_base 18: mod_base = OTHER; note = 2'-O-methylguanosine-3'-phosphate
  modified_base 19: mod_base = OTHER; note = 2'-O-methyladenosine-3'-phosphorothioate
  modified_base 20: mod_base = OTHER; note = 2'-O-methylcytidine-3'-phosphorothioate
  modified_base 21: mod_base = OTHER; note = 2'-O-methyladenosine-3'-phosphate
tgtgctcttcgtcatctgaca

SEQ ID NO: 756 - RNA, 21 nt, synthetic construct
  source 1..21: mol_type = other RNA
  modified_base 1: mod_base = OTHER; note = 2'-O-methyluridine-3'-phosphorothioate
  modified_base 2: mod_base = OTHER; note = 2'-O-methylguanosine-3'-phosphorothioate
  modified_base 3: mod_base = OTHER; note = 2'-O-methylguanosine-3'-phosphate
  modified_base 4: mod_base = OTHER; note = 2'-O-methyladenosine-3'-phosphate
  modified_base 5: mod_base = OTHER; note = 2'-O-methylcytidine-3'-phosphate
  modified_base 6: mod_base = OTHER; note = 2'-O-methyluridine-3'-phosphate
  modified_base 7: mod_base = OTHER; note = 2'-fluoroadenosine-3'-phosphate
  modified_base 8: mod_base = OTHER; note = 2'-O-methylcytidine-3'-phosphate
  modified_base 9: mod_base = OTHER; note = 2'-fluorocytidine-3'-phosphate
  modified_base 10: mod_base = OTHER; note = 2'-fluoroadenosine-3'-phosphate
  modified_base 11: mod_base = OTHER; note = 2'-fluoroguanosine-3'-phosphate
  modified_base 12: mod_base = OTHER; note = 2'-O-methyluridine-3'-phosphate
  modified_base 13: mod_base = OTHER; note = 2'-O-methyluridine-3'-phosphate
  modified_base 14: mod_base = OTHER; note = 2'-O-methylguanosine-3'-phosphate
  modified_base 15: mod_base = OTHER; note = 2'-O-methyluridine-3'-phosphate
  modified_base 16: mod_base = OTHER; note = 2'-O-methylguanosine-3'-phosphate
  modified_base 17: mod_base = OTHER; note = 2'-O-methylguanosine-3'-phosphate
  modified_base 18: mod_base = OTHER; note = 2'-O-methyluridine-3'-phosphate
  modified_base 19: mod_base = OTHER; note = 2'-O-methyluridine-3'-phosphorothioate
  modified_base 20: mod_base = OTHER; note = 2'-O-methyladenosine-3'-phosphorothioate
  modified_base 21: mod_base = OTHER; note = 2'-O-methyladenosine-3'-phosphate
tggactaccagttgtggttaa

SEQ ID NO: 757 - RNA, 21 nt, synthetic construct
  source 1..21: mol_type = other RNA
  modified_base 1: mod_base = OTHER; note = 2'-O-methylguanosine-3'-phosphorothioate
  modified_base 2: mod_base = OTHER; note = 2'-O-methyladenosine-3'-phosphorothioate
  modified_base 3: mod_base = OTHER; note = 2'-O-methylcytidine-3'-phosphate
  modified_base 4: mod_base = OTHER; note = 2'-O-methyluridine-3'-phosphate
  modified_base 5: mod_base = OTHER; note = 2'-O-methyladenosine-3'-phosphate
  modified_base 6: mod_base = OTHER; note = 2'-O-methylcytidine-3'-phosphate
  modified_base 7: mod_base = OTHER; note = 2'-O-methylcytidine-3'-phosphate
  modified_base 8: mod_base = OTHER; note = 2'-O-methyladenosine-3'-phosphate
  modified_base 9: mod_base = OTHER; note = 2'-fluoroguanosine-3'-phosphate
  modified_base 10: mod_base = OTHER; note = 2'-fluorouridine-3'-phosphate
  modified_base 11: mod_base = OTHER; note = 2'-fluorouridine-3'-phosphate
  modified_base 12: mod_base = OTHER; note = 2'-O-methylguanosine-3'-phosphate
  modified_base 13: mod_base = OTHER; note = 2'-O-methyluridine-3'-phosphate
  modified_base 14: mod_base = OTHER; note = 2'-O-methylguanosine-3'-phosphate
  modified_base 15: mod_base = OTHER; note = 2'-O-methylguanosine-3'-phosphate
  modified_base 16: mod_base = OTHER; note = 2'-O-methyluridine-3'-phosphate
  modified_base 17: mod_base = OTHER; note = 2'-O-methyluridine-3'-phosphate
  modified_base 18: mod_base = OTHER; note = 2'-O-methyladenosine-3'-phosphate
  modified_base 19: mod_base = OTHER; note = 2'-O-methyladenosine-3'-phosphorothioate
  modified_base 20: mod_base = OTHER; note = 2'-O-methylguanosine-3'-phosphorothioate
  modified_base 21: mod_base = OTHER; note = 2'-O-methyladenosine-3'-phosphate
gactaccagttgtggttaaga

SEQ ID NO: 758 - RNA, 21 nt, synthetic construct
  source 1..21: mol_type = other RNA
  modified_base 1: mod_base = OTHER; note = 2'-O-methyluridine-3'-phosphorothioate
  modified_base 2: mod_base = OTHER; note = 2'-O-methylguanosine-3'-phosphorothioate
  modified_base 3: mod_base = OTHER; note = 2'-O-methyluridine-3'-phosphate
  modified_base 4: mod_base = OTHER; note = 2'-O-methylguanosine-3'-phosphate
  modified_base 5: mod_base = OTHER; note = 2'-O-methylguanosine-3'-phosphate
  modified_base 6: mod_base = OTHER; note = 2'-O-methyluridine-3'-phosphate
  modified_base 7: mod_base = OTHER; note = 2'-fluorouridine-3'-phosphate
  modified_base 8: mod_base = OTHER; note = 2'-O-methyladenosine-3'-phosphate
  modified_base 9: mod_base = OTHER; note = 2'-fluoroadenosine-3'-phosphate
  modified_base 10: mod_base = OTHER; note = 2'-fluoroguanosine-3'-phosphate
  modified_base 11: mod_base = OTHER; note = 2'-fluorocytidine-3'-phosphate
  modified_base 12: mod_base = OTHER; note = 2'-O-methyluridine-3'-phosphate
  modified_base 13: mod_base = OTHER; note = 2'-O-methylcytidine-3'-phosphate
  modified_base 14: mod_base = OTHER; note = 2'-O-methyluridine-3'-phosphate
  modified_base 15: mod_base = OTHER; note = 2'-O-methyluridine-3'-phosphate
  modified_base 16: mod_base = OTHER; note = 2'-O-methyladenosine-3'-phosphate
  modified_base 17: mod_base = OTHER; note = 2'-O-methylcytidine-3'-phosphate
  modified_base 18: mod_base = OTHER; note = 2'-O-methyladenosine-3'-phosphate
  modified_base 19: mod_base = OTHER; note = 2'-O-methylcytidine-3'-phosphorothioate
  modified_base 20: mod_base = OTHER; note = 2'-O-methylcytidine-3'-phosphorothioate
  modified_base 21: mod_base = OTHER; note = 2'-O-methyladenosine-3'-phosphate
tgtggttaagctcttacacca

SEQ ID NO: 759 - RNA, 21 nt, synthetic construct
  source 1..21: mol_type = other RNA
  modified_base 1: mod_base = OTHER; note = 2'-O-methylguanosine-3'-phosphorothioate
  modified_base 2: mod_base = OTHER; note = 2'-O-methyladenosine-3'-phosphorothioate
  modified_base 3: mod_base = OTHER; note = 2'-O-methyluridine-3'-phosphate
  modified_base 4: mod_base = OTHER; note = 2'-O-methyladenosine-3'-phosphate
  modified_base 5: mod_base = OTHER; note = 2'-O-methyladenosine-3'-phosphate
  modified_base 6: mod_base = OTHER; note = 2'-O-methyladenosine-3'-phosphate
  modified_base 7: mod_base = OTHER; note = 2'-O-methylguanosine-3'-phosphate
  modified_base 8: mod_base = OTHER; note = 2'-O-methylguanosine-3'-phosphate
  modified_base 9: mod_base = OTHER; note = 2'-fluorocytidine-3'-phosphate
  modified_base 10: mod_base = OTHER; note = 2'-fluorouridine-3'-phosphate
  modified_base 11: mod_base = OTHER; note = 2'-fluoroadenosine-3'-phosphate
  modified_base 12: mod_base = OTHER; note = 2'-O-methylcytidine-3'-phosphate
  modified_base 13: mod_base = OTHER; note = 2'-O-methyluridine-3'-phosphate
  modified_base 14: mod_base = OTHER; note = 2'-O-methylguanosine-3'-phosphate
  modified_base 15: mod_base = OTHER; note = 2'-O-methyluridine-3'-phosphate
  modified_base 16: mod_base = OTHER; note = 2'-O-methyluridine-3'-phosphate
  modified_base 17: mod_base = OTHER; note = 2'-O-methylguanosine-3'-phosphate
  modified_base 18: mod_base = OTHER; note = 2'-O-methylguanosine-3'-phosphate
  modified_base 19: mod_base = OTHER; note = 2'-O-methyladenosine-3'-phosphorothioate
  modified_base 20: mod_base = OTHER; note = 2'-O-methyluridine-3'-phosphorothioate
  modified_base 21: mod_base = OTHER; note = 2'-O-methyladenosine-3'-phosphate
gataaaggctactgttggata

SEQ ID NO: 760 - RNA, 21 nt, synthetic construct
  source 1..21: mol_type = other RNA
  modified_base 1: mod_base = OTHER; note = 2'-O-methyladenosine-3'-phosphorothioate
  modified_base 2: mod_base = OTHER; note = 2'-O-methyluridine-3'-phosphorothioate
  modified_base 3: mod_base = OTHER; note = 2'-O-methyladenosine-3'-phosphate
  modified_base 4: mod_base = OTHER; note = 2'-O-methyladenosine-3'-phosphate
  modified_base 5: mod_base = OTHER; note = 2'-O-methyladenosine-3'-phosphate
  modified_base 6: mod_base = OTHER; note = 2'-O-methylguanosine-3'-phosphate
  modified_base 7: mod_base = OTHER; note = 2'-fluoroguanosine-3'-phosphate
  modified_base 8: mod_base = OTHER; note = 2'-O-methylcytidine-3'-phosphate
  modified_base 9: mod_base = OTHER; note = 2'-fluorouridine-3'-phosphate
  modified_base 10: mod_base = OTHER; note = 2'-fluoroadenosine-3'-phosphate
  modified_base 11: mod_base = OTHER; note = 2'-fluorocytidine-3'-phosphate
  modified_base 12: mod_base = OTHER; note = 2'-O-methyluridine-3'-phosphate
  modified_base 13: mod_base = OTHER; note = 2'-O-methylguanosine-3'-phosphate
  modified_base 14: mod_base = OTHER; note = 2'-O-methyluridine-3'-phosphate
  modified_base 15: mod_base = OTHER; note = 2'-O-methyluridine-3'-phosphate
  modified_base 16: mod_base = OTHER; note = 2'-O-methylguanosine-3'-phosphate
  modified_base 17: mod_base = OTHER; note = 2'-O-methylguanosine-3'-phosphate
  modified_base 18: mod_base = OTHER; note = 2'-O-methyladenosine-3'-phosphate
  modified_base 19: mod_base = OTHER; note = 2'-O-methyluridine-3'-phosphorothioate
  modified_base 20: mod_base = OTHER; note = 2'-O-methyluridine-3'-phosphorothioate
  modified_base 21: mod_base = OTHER; note = 2'-O-methyladenosine-3'-phosphate
ataaaggctactgttggatta

SEQ ID NO: 761 - RNA, 21 nt, synthetic construct
  source 1..21: mol_type = other RNA
  modified_base 1: mod_base = OTHER; note = 2'-O-methyladenosine-3'-phosphorothioate
  modified_base 2: mod_base = OTHER; note = 2'-O-methyluridine-3'-phosphorothioate
  modified_base 3: mod_base = OTHER; note = 2'-O-methyladenosine-3'-phosphate
  modified_base 4: mod_base = OTHER; note = 2'-O-methyladenosine-3'-phosphate
  modified_base 5: mod_base = OTHER; note = 2'-O-methyladenosine-3'-phosphate
  modified_base 6: mod_base = OTHER; note = 2'-O-methylguanosine-3'-phosphate
  modified_base 7: mod_base = OTHER; note = 2'-O-methylguanosine-3'-phosphate
  modified_base 8: mod_base = OTHER; note = 2'-O-methylcytidine-3'-phosphate
  modified_base 9: mod_base = OTHER; note = 2'-fluorouridine-3'-phosphate
  modified_base 10: mod_base = OTHER; note = 2'-fluoroadenosine-3'-phosphate
  modified_base 11: mod_base = OTHER; note = 2'-fluorocytidine-3'-phosphate
  modified_base 12: mod_base = OTHER; note = 2'-O-methyluridine-3'-phosphate
  modified_base 13: mod_base = OTHER; note = 2'-O-methylguanosine-3'-phosphate
  modified_base 14: mod_base = OTHER; note = 2'-O-methyluridine-3'-phosphate
  modified_base 15: mod_base = OTHER; note = 2'-O-methyluridine-3'-phosphate
  modified_base 16: mod_base = OTHER; note = 2'-O-methylguanosine-3'-phosphate
  modified_base 17: mod_base = OTHER; note = 2'-O-methylguanosine-3'-phosphate
  modified_base 18: mod_base = OTHER; note = 2'-O-methyladenosine-3'-phosphate
  modified_base 19: mod_base = OTHER; note = 2'-O-methyluridine-3'-phosphorothioate
  modified_base 20: mod_base = OTHER; note = 2'-O-methyluridine-3'-phosphorothioate
  modified_base 21: mod_base = OTHER; note = 2'-O-methyladenosine-3'-phosphate
ataaaggctactgttggatta

SEQ ID NO: 762 - RNA, 21 nt, synthetic construct
  source 1..21: mol_type = other RNA
  modified_base 1: mod_base = OTHER; note = 2'-O-methyladenosine-3'-phosphorothioate
  modified_base 2: mod_base = OTHER; note = 2'-O-methyladenosine-3'-phosphorothioate
  modified_base 3: mod_base = OTHER; note = 2'-O-methylguanosine-3'-phosphate
  modified_base 4: mod_base = OTHER; note = 2'-O-methylguanosine-3'-phosphate
  modified_base 5: mod_base = OTHER; note = 2'-O-methylcytidine-3'-phosphate
  modified_base 6: mod_base = OTHER; note = 2'-O-methyluridine-3'-phosphate
  modified_base 7: mod_base = OTHER; note = 2'-fluoroadenosine-3'-phosphate
  modified_base 8: mod_base = OTHER; note = 2'-O-methylcytidine-3'-phosphate
  modified_base 9: mod_base = OTHER; note = 2'-fluorouridine-3'-phosphate
  modified_base 10: mod_base = OTHER; note = 2'-fluoroguanosine-3'-phosphate
  modified_base 11: mod_base = OTHER; note = 2'-fluorouridine-3'-phosphate
  modified_base 12: mod_base = OTHER; note = 2'-O-methyluridine-3'-phosphate
  modified_base 13: mod_base = OTHER; note = 2'-O-methylguanosine-3'-phosphate
  modified_base 14: mod_base = OTHER; note = 2'-O-methylguanosine-3'-phosphate
  modified_base 15: mod_base = OTHER; note = 2'-O-methyladenosine-3'-phosphate
  modified_base 16: mod_base = OTHER; note = 2'-O-methyluridine-3'-phosphate
  modified_base 17: mod_base = OTHER; note = 2'-O-methyluridine-3'-phosphate
  modified_base 18: mod_base = OTHER; note = 2'-O-methylguanosine-3'-phosphate
  modified_base 19: mod_base = OTHER; note = 2'-O-methyladenosine-3'-phosphorothioate
  modified_base 20: mod_base = OTHER; note = 2'-O-methyluridine-3'-phosphorothioate
  modified_base 21: mod_base = OTHER; note = 2'-O-methyladenosine-3'-phosphate
aaggctactgttggattgata

SEQ ID NO: 763 - RNA, 21 nt, synthetic construct
  source 1..21: mol_type = other RNA
  modified_base 1: mod_base = OTHER; note = 2'-O-methyladenosine-3'-phosphorothioate
  modified_base 2: mod_base = OTHER; note = 2'-O-methyladenosine-3'-phosphorothioate
  modified_base 3: mod_base = OTHER; note = 2'-O-methylguanosine-3'-phosphate
  modified_base 4: mod_base = OTHER; note = 2'-O-methylguanosine-3'-phosphate
  modified_base 5: mod_base = OTHER; note = 2'-O-methylcytidine-3'-phosphate
  modified_base 6: mod_base = OTHER; note = 2'-O-methyluridine-3'-phosphate
  modified_base 7: mod_base = OTHER; note = 2'-O-methyladenosine-3'-phosphate
  modified_base 8: mod_base = OTHER; note = 2'-O-methylcytidine-3'-phosphate
  modified_base 9: mod_base = OTHER; note = 2'-fluorouridine-3'-phosphate
  modified_base 10: mod_base = OTHER; note = 2'-fluoroguanosine-3'-phosphate
  modified_base 11: mod_base = OTHER; note = 2'-fluorouridine-3'-phosphate
  modified_base 12: mod_base = OTHER; note = 2'-O-methyluridine-3'-phosphate
  modified_base 13: mod_base = OTHER; note = 2'-O-methylguanosine-3'-phosphate
  modified_base 14: mod_base = OTHER; note = 2'-O-methylguanosine-3'-phosphate
  modified_base 15: mod_base = OTHER; note = 2'-O-methyladenosine-3'-phosphate
  modified_base 16: mod_base = OTHER; note = 2'-O-methyluridine-3'-phosphate
  modified_base 17: mod_base = OTHER; note = 2'-O-methyluridine-3'-phosphate
  modified_base 18: mod_base = OTHER; note = 2'-O-methylguanosine-3'-phosphate
  modified_base 19: mod_base = OTHER; note = 2'-O-methyladenosine-3'-phosphorothioate
  modified_base 20: mod_base = OTHER; note = 2'-O-methyluridine-3'-phosphorothioate
  modified_base 21: mod_base = OTHER; note = 2'-O-methyladenosine-3'-phosphate
aaggctactgttggattgata

SEQ ID NO: 764 - RNA, 21 nt, synthetic construct
  source 1..21: mol_type = other RNA
  modified_base 1: mod_base = OTHER; note = 2'-O-methyladenosine-3'-phosphorothioate
  modified_base 2: mod_base = OTHER; note = 2'-O-methylguanosine-3'-phosphorothioate
  modified_base 3: mod_base = OTHER; note = 2'-O-methylguanosine-3'-phosphate
  modified_base 4: mod_base = OTHER; note = 2'-O-methylcytidine-3'-phosphate
  modified_base 5: mod_base = OTHER; note = 2'-O-methyluridine-3'-phosphate
  modified_base 6: mod_base = OTHER; note = 2'-O-methyladenosine-3'-phosphate
  modified_base 7: mod_base = OTHER; note = 2'-O-methylcytidine-3'-phosphate
  modified_base 8: mod_base = OTHER; note = 2'-O-methyluridine-3'-phosphate
  modified_base 9: mod_base = OTHER; note = 2'-fluoroguanosine-3'-phosphate
  modified_base 10: mod_base = OTHER; note = 2'-fluorouridine-3'-phosphate
  modified_base 11: mod_base = OTHER; note = 2'-fluorouridine-3'-phosphate
  modified_base 12: mod_base = OTHER; note = 2'-O-methylguanosine-3'-phosphate
  modified_base 13: mod_base = OTHER; note = 2'-O-methylguanosine-3'-phosphate
  modified_base 14: mod_base = OTHER; note = 2'-O-methyladenosine-3'-phosphate
  modified_base 15: mod_base = OTHER; note = 2'-O-methyluridine-3'-phosphate
  modified_base 16: mod_base = OTHER; note = 2'-O-methyluridine-3'-phosphate
  modified_base 17: mod_base = OTHER; note = 2'-O-methylguanosine-3'-phosphate
  modified_base 18: mod_base = OTHER; note = 2'-O-methyladenosine-3'-phosphate
  modified_base 19: mod_base = OTHER; note = 2'-O-methyluridine-3'-phosphorothioate
  modified_base 20: mod_base = OTHER; note = 2'-O-methyluridine-3'-phosphorothioate
  modified_base 21: mod_base = OTHER; note = 2'-O-methyladenosine-3'-phosphate
aggctactgttggattgatta

SEQ ID NO: 765 - RNA, 21 nt, synthetic construct
  source 1..21: mol_type = other RNA
  modified_base 1: mod_base = OTHER; note = 2'-O-methylguanosine-3'-phosphorothioate
  modified_base 2: mod_base = OTHER; note = 2'-O-methylguanosine-3'-phosphorothioate
  modified_base 3: mod_base = OTHER; note = 2'-O-methylcytidine-3'-phosphate
  modified_base 4: mod_base = OTHER; note = 2'-O-methyluridine-3'-phosphate
  modified_base 5: mod_base = OTHER; note = 2'-O-methyladenosine-3'-phosphate
  modified_base 6: mod_base = OTHER; note = 2'-O-methylcytidine-3'-phosphate
  modified_base 7: mod_base = OTHER; note = 2'-fluorouridine-3'-phosphate
  modified_base 8: mod_base = OTHER; note = 2'-O-methylguanosine-3'-phosphate
  modified_base 9: mod_base = OTHER; note = 2'-fluorouridine-3'-phosphate
  modified_base 10: mod_base = OTHER; note = 2'-fluorouridine-3'-phosphate
  modified_base 11: mod_base = OTHER; note = 2'-fluoroguanosine-3'-phosphate
  modified_base 12: mod_base = OTHER; note = 2'-O-methylguanosine-3'-phosphate
  modified_base 13: mod_base = OTHER; note = 2'-O-methyladenosine-3'-phosphate
  modified_base 14: mod_base = OTHER; note = 2'-O-methyluridine-3'-phosphate
  modified_base 15: mod_base = OTHER; note = 2'-O-methyluridine-3'-phosphate
  modified_base 16: mod_base = OTHER; note = 2'-O-methylguanosine-3'-phosphate
  modified_base 17: mod_base = OTHER; note = 2'-O-methyladenosine-3'-phosphate
  modified_base 18: mod_base = OTHER; note = 2'-O-methyluridine-3'-phosphate
  modified_base 19: mod_base = OTHER; note = 2'-O-methyluridine-3'-phosphorothioate
  modified_base 20: mod_base = OTHER; note = 2'-O-methylcytidine-3'-phosphorothioate
  modified_base 21: mod_base = OTHER; note = 2'-O-methyladenosine-3'-phosphate
ggctactgttggattgattca

SEQ ID NO: 766 - RNA, 21 nt, synthetic construct
  source 1..21: mol_type = other RNA
  modified_base 1: mod_base = OTHER; note = 2'-O-methylguanosine-3'-phosphorothioate
  modified_base 2: mod_base = OTHER; note = 2'-O-methylcytidine-3'-phosphorothioate
  modified_base 3: mod_base = OTHER; note = 2'-O-methyluridine-3'-phosphate
  modified_base 4: mod_base = OTHER; note = 2'-O-methyladenosine-3'-phosphate
  modified_base 5: mod_base = OTHER; note = 2'-O-methylcytidine-3'-phosphate
  modified_base 6: mod_base = OTHER; note = 2'-O-methyluridine-3'-phosphate
  modified_base 7: mod_base = OTHER; note = 2'-O-methylguanosine-3'-phosphate
  modified_base 8: mod_base = OTHER; note = 2'-O-methyluridine-3'-phosphate
  modified_base 9: mod_base = OTHER; note = 2'-fluorouridine-3'-phosphate
  modified_base 10: mod_base = OTHER; note = 2'-fluoroguanosine-3'-phosphate
  modified_base 11: mod_base = OTHER; note = 2'-fluoroguanosine-3'-phosphate
  modified_base 12: mod_base = OTHER; note = 2'-O-methyladenosine-3'-phosphate
  modified_base 13: mod_base = OTHER; note = 2'-O-methyluridine-3'-phosphate
  modified_base 14: mod_base = OTHER; note = 2'-O-methyluridine-3'-phosphate
  modified_base 15: mod_base = OTHER; note = 2'-O-methylguanosine-3'-phosphate
  modified_base 16: mod_base = OTHER; note = 2'-O-methyladenosine-3'-phosphate
  modified_base 17: mod_base = OTHER; note = 2'-O-methyluridine-3'-phosphate
  modified_base 18: mod_base = OTHER; note = 2'-O-methyluridine-3'-phosphate
  modified_base 19: mod_base = OTHER; note = 2'-O-methylcytidine-3'-phosphorothioate
  modified_base 20: mod_base = OTHER; note = 2'-O-methylguanosine-3'-phosphorothioate
  modified_base 21: mod_base = OTHER; note = 2'-O-methyladenosine-3'-phosphate
gctactgttggattgattcga

SEQ ID NO: 767 - RNA, 21 nt, synthetic construct
  source 1..21: mol_type = other RNA
  modified_base 1: mod_base = OTHER; note = 2'-O-methylcytidine-3'-phosphorothioate
  modified_base 2: mod_base = OTHER; note = 2'-O-methyluridine-3'-phosphorothioate
  modified_base 3: mod_base = OTHER; note = 2'-O-methyladenosine-3'-phosphate
  modified_base 4: mod_base = OTHER; note = 2'-O-methylcytidine-3'-phosphate
  modified_base 5: mod_base = OTHER; note = 2'-O-methyluridine-3'-phosphate
  modified_base 6: mod_base = OTHER; note = 2'-O-methylguanosine-3'-phosphate
  modified_base 7: mod_base = OTHER; note = 2'-O-methyluridine-3'-phosphate
  modified_base 8: mod_base = OTHER; note = 2'-O-methyluridine-3'-phosphate
  modified_base 9: mod_base = OTHER; note = 2'-fluoroguanosine-3'-phosphate
  modified_base 10: mod_base = OTHER; note = 2'-fluoroguanosine-3'-phosphate
  modified_base 11: mod_base = OTHER; note = 2'-fluoroadenosine-3'-phosphate
  modified_base 12: mod_base = OTHER; note = 2'-O-methyluridine-3'-phosphate
  modified_base 13: mod_base = OTHER; note = 2'-O-methyluridine-3'-phosphate
  modified_base 14: mod_base = OTHER; note = 2'-O-methylguanosine-3'-phosphate
  modified_base 15: mod_base = OTHER; note = 2'-O-methyladenosine-3'-phosphate
  modified_base 16: mod_base = OTHER; note = 2'-O-methyluridine-3'-phosphate
  modified_base 17: mod_base = OTHER; note = 2'-O-methyluridine-3'-phosphate
  modified_base 18: mod_base = OTHER; note = 2'-O-methylcytidine-3'-phosphate
  modified_base 19: mod_base = OTHER; note = 2'-O-methylguanosine-3'-phosphorothioate
  modified_base 20: mod_base = OTHER; note = 2'-O-methyladenosine-3'-phosphorothioate
  modified_base 21: mod_base = OTHER; note = 2'-O-methyladenosine-3'-phosphate
ctactgttggattgattcgaa

SEQ ID NO: 768 - RNA, 21 nt, synthetic construct
  source 1..21: mol_type = other RNA
  modified_base 1: mod_base = OTHER; note = 2'-O-methyladenosine-3'-phosphorothioate
  modified_base 2: mod_base = OTHER; note = 2'-O-methylcytidine-3'-phosphorothioate
  modified_base 3: mod_base = OTHER; note = 2'-O-methyluridine-3'-phosphate
  modified_base 4: mod_base = OTHER; note = 2'-O-methylguanosine-3'-phosphate
  modified_base 5: mod_base = OTHER; note = 2'-O-methyluridine-3'-phosphate
  modified_base 6: mod_base = OTHER; note = 2'-O-methyluridine-3'-phosphate
  modified_base 7: mod_base = OTHER; note = 2'-O-methylguanosine-3'-phosphate
  modified_base 8: mod_base = OTHER; note = 2'-O-methylguanosine-3'-phosphate
  modified_base 9: mod_base = OTHER; note = 2'-fluoroadenosine-3'-phosphate
  modified_base 10: mod_base = OTHER; note = 2'-fluorouridine-3'-phosphate
  modified_base 11: mod_base = OTHER; note = 2'-fluorouridine-3'-phosphate
  modified_base 12: mod_base = OTHER; note = 2'-O-methylguanosine-3'-phosphate
  modified_base 13: mod_base = OTHER; note = 2'-O-methyladenosine-3'-phosphate
  modified_base 14: mod_base = OTHER; note = 2'-O-methyluridine-3'-phosphate
  modified_base 15: mod_base = OTHER; note = 2'-O-methyluridine-3'-phosphate
  modified_base 16: mod_base = OTHER; note = 2'-O-methylcytidine-3'-phosphate
  modified_base 17: mod_base = OTHER; note = 2'-O-methylguanosine-3'-phosphate
  modified_base 18: mod_base = OTHER; note = 2'-O-methyladenosine-3'-phosphate
  modified_base 19: mod_base = OTHER; note = 2'-O-methyladenosine-3'-phosphorothioate
  modified_base 20: mod_base = OTHER; note = 2'-O-methyladenosine-3'-phosphorothioate
  modified_base 21: mod_base = OTHER; note = 2'-O-methyladenosine-3'-phosphate
actgttggattgattcgaaaa

SEQ ID NO: 769 - RNA, 21 nt, synthetic construct
  source 1..21: mol_type = other RNA
  modified_base 1: mod_base = OTHER; note = 2'-O-methylcytidine-3'-phosphorothioate
  modified_base 2: mod_base = OTHER; note = 2'-O-methyluridine-3'-phosphorothioate
  modified_base 3: mod_base = OTHER; note = 2'-O-methylguanosine-3'-phosphate
  modified_base 4: mod_base = OTHER; note = 2'-O-methyluridine-3'-phosphate
  modified_base 5: mod_base = OTHER; note = 2'-O-methyluridine-3'-phosphate
  modified_base 6: mod_base = OTHER; note = 2'-O-methylguanosine-3'-phosphate
  modified_base 7: mod_base = OTHER; note = 2'-O-methylguanosine-3'-phosphate
  modified_base 8: mod_base = OTHER; note = 2'-O-methyladenosine-3'-phosphate
  modified_base 9: mod_base = OTHER; note = 2'-fluorouridine-3'-phosphate
  modified_base 10: mod_base = OTHER; note = 2'-fluorouridine-3'-phosphate
  modified_base 11: mod_base = OTHER; note = 2'-fluoroguanosine-3'-phosphate
  modified_base 12: mod_base = OTHER; note = 2'-O-methyladenosine-3'-phosphate
  modified_base 13: mod_base = OTHER; note = 2'-O-methyluridine-3'-phosphate
  modified_base 14: mod_base = OTHER; note = 2'-O-methyluridine-3'-phosphate
  modified_base 15: mod_base = OTHER; note = 2'-O-methylcytidine-3'-phosphate
  modified_base 16: mod_base = OTHER; note = 2'-O-methylguanosine-3'-phosphate
  modified_base 17: mod_base = OTHER; note = 2'-O-methyladenosine-3'-phosphate
  modified_base 18: mod_base = OTHER; note = 2'-O-methyladenosine-3'-phosphate
  modified_base 19: mod_base = OTHER; note = 2'-O-methyladenosine-3'-phosphorothioate
  modified_base 20: mod_base = OTHER; note = 2'-O-methyluridine-3'-phosphorothioate
  modified_base 21: mod_base = OTHER; note = 2'-O-methyladenosine-3'-phosphate
ctgttggattgattcgaaata

SEQ ID NO: 770 - RNA, 21 nt, synthetic construct
  source 1..21: mol_type = other RNA
  modified_base 1: mod_base = OTHER; note = 2'-O-methylguanosine-3'-phosphorothioate
  modified_base 2: mod_base = OTHER; note = 2'-O-methyluridine-3'-phosphorothioate
  modified_base 3: mod_base = OTHER; note = 2'-O-methyluridine-3'-phosphate
  modified_base 4: mod_base = OTHER; note = 2'-O-methylguanosine-3'-phosphate
  modified_base 5: mod_base = OTHER; note = 2'-O-methylguanosine-3'-phosphate
  modified_base 6: mod_base = OTHER; note = 2'-O-methyladenosine-3'-phosphate
  modified_base 7: mod_base = OTHER; note = 2'-O-methyluridine-3'-phosphate
  modified_base 8: mod_base = OTHER; note = 2'-O-methyluridine-3'-phosphate
  modified_base 9: mod_base = OTHER; note = 2'-fluoroguanosine-3'-phosphate
  modified_base 10: mod_base = OTHER; note = 2'-fluoroadenosine-3'-phosphate
  modified_base 11: mod_base = OTHER; note = 2'-fluorouridine-3'-phosphate
  modified_base 12: mod_base = OTHER; note = 2'-O-methyluridine-3'-phosphate
  modified_base 13: mod_base = OTHER; note = 2'-O-methylcytidine-3'-phosphate
  modified_base 14: mod_base = OTHER; note = 2'-O-methylguanosine-3'-phosphate
  modified_base 15: mod_base = OTHER; note = 2'-O-methyladenosine-3'-phosphate
  modified_base 16: mod_base = OTHER; note = 2'-O-methyladenosine-3'-phosphate
  modified_base 17: mod_base = OTHER; note = 2'-O-methyladenosine-3'-phosphate
  modified_base 18: mod_base = OTHER; note = 2'-O-methyluridine-3'-phosphate
  modified_base 19: mod_base = OTHER; note = 2'-O-methylcytidine-3'-phosphorothioate
  modified_base 20: mod_base = OTHER; note = 2'-O-methyluridine-3'-phosphorothioate
  modified_base 21: mod_base = OTHER; note = 2'-O-methyladenosine-3'-phosphate
gttggattgattcgaaatcta

SEQ ID NO: 771 - RNA, 21 nt, synthetic construct
  source 1..21: mol_type = other RNA
  modified_base 1: mod_base = OTHER; note = 2'-O-methylguanosine-3'-phosphorothioate
  modified_base 2: mod_base = OTHER; note = 2'-O-methyluridine-3'-phosphorothioate
  modified_base 3: mod_base = OTHER; note = 2'-O-methyluridine-3'-phosphate
  modified_base 4: mod_base = OTHER; note = 2'-O-methylguanosine-3'-phosphate
  modified_base 5: mod_base = OTHER; note = 2'-O-methylguanosine-3'-phosphate
  modified_base 6: mod_base = OTHER; note = 2'-O-methyladenosine-3'-phosphate
  modified_base 7: mod_base = OTHER; note = 2'-fluorouridine-3'-phosphate
  modified_base 8: mod_base = OTHER; note = 2'-O-methyluridine-3'-phosphate
  modified_base 9: mod_base = OTHER; note = 2'-fluoroguanosine-3'-phosphate
  modified_base 10: mod_base = OTHER; note = 2'-fluoroadenosine-3'-phosphate
  modified_base 11: mod_base = OTHER; note = 2'-fluorouridine-3'-phosphate
  modified_base 12: mod_base = OTHER; note = 2'-O-methyluridine-3'-phosphate
  modified_base 13: mod_base = OTHER; note = 2'-O-methylcytidine-3'-phosphate
  modified_base 14: mod_base = OTHER; note = 2'-O-methylguanosine-3'-phosphate
  modified_base 15: mod_base = OTHER; note = 2'-O-methyladenosine-3'-phosphate
  modified_base 16: mod_base = OTHER; note = 2'-O-methyladenosine-3'-phosphate
  modified_base 17: mod_base = OTHER; note = 2'-O-methyladenosine-3'-phosphate
  modified_base 18: mod_base = OTHER; note = 2'-O-methyluridine-3'-phosphate
  modified_base 19: mod_base = OTHER; note = 2'-O-methylcytidine-3'-phosphorothioate
  modified_base 20: mod_base = OTHER; note = 2'-O-methyluridine-3'-phosphorothioate
  modified_base 21: mod_base = OTHER; note = 2'-O-methyladenosine-3'-phosphate
gttggattgattcgaaatcta

SEQ ID NO: 772 - RNA, 21 nt, synthetic construct
  source 1..21: mol_type = other RNA
  modified_base 1: mod_base = OTHER; note = 2'-O-methyluridine-3'-phosphorothioate
  modified_base 2: mod_base = OTHER; note = 2'-O-methyluridine-3'-phosphorothioate
  modified_base 3: mod_base = OTHER; note = 2'-O-methylguanosine-3'-phosphate
  modified_base 4: mod_base = OTHER; note = 2'-O-methylguanosine-3'-phosphate
  modified_base 5: mod_base = OTHER; note = 2'-O-methyladenosine-3'-phosphate
  modified_base 6: mod_base = OTHER; note = 2'-O-methyluridine-3'-phosphate
  modified_base 7: mod_base = OTHER; note = 2'-O-methyluridine-3'-phosphate
  modified_base 8: mod_base = OTHER; note = 2'-O-methylguanosine-3'-phosphate
  modified_base 9: mod_base = OTHER; note = 2'-fluoroadenosine-3'-phosphate
  modified_base 10: mod_base = OTHER; note = 2'-fluorouridine-3'-phosphate
  modified_base 11: mod_base = OTHER; note = 2'-fluorouridine-3'-phosphate
  modified_base 12: mod_base = OTHER; note = 2'-O-methylcytidine-3'-phosphate
  modified_base 13: mod_base = OTHER; note = 2'-O-methylguanosine-3'-phosphate
  modified_base 14: mod_base = OTHER; note = 2'-O-methyladenosine-3'-phosphate
  modified_base 15: mod_base = OTHER; note = 2'-O-methyladenosine-3'-phosphate
  modified_base 16: mod_base = OTHER; note = 2'-O-methyladenosine-3'-phosphate
  modified_base 17: mod_base = OTHER; note = 2'-O-methyluridine-3'-phosphate
  modified_base 18: mod_base = OTHER; note = 2'-O-methylcytidine-3'-phosphate
  modified_base 19: mod_base = OTHER; note = 2'-O-methyluridine-3'-phosphorothioate
  modified_base 20: mod_base = OTHER; note = 2'-O-methyluridine-3'-phosphorothioate
  modified_base 21: mod_base = OTHER; note = 2'-O-methyladenosine-3'-phosphate
ttggattgattcgaaatctta

SEQ ID NO: 773 - RNA, 21 nt, synthetic construct
  source 1..21: mol_type = other RNA
  modified_base 1: mod_base = OTHER; note = 2'-O-methylguanosine-3'-phosphorothioate
  modified_base 2: mod_base = OTHER; note = 2'-O-methylguanosine-3'-phosphorothioate
  modified_base 3: mod_base = OTHER; note = 2'-O-methyladenosine-3'-phosphate
  modified_base 4: mod_base = OTHER; note = 2'-O-methyluridine-3'-phosphate
  modified_base 5: mod_base = OTHER; note = 2'-O-methyluridine-3'-phosphate
  modified_base 6: mod_base = OTHER; note = 2'-O-methylguanosine-3'-phosphate
  modified_base 7: mod_base = OTHER; note = 2'-fluoroadenosine-3'-phosphate
  modified_base 8: mod_base = OTHER; note = 2'-O-methyluridine-3'-phosphate
  modified_base 9: mod_base = OTHER; note = 2'-fluorouridine-3'-phosphate
  modified_base 10: mod_base = OTHER; note = 2'-fluorocytidine-3'-phosphate
  modified_base 11: mod_base = OTHER; note = 2'-fluoroguanosine-3'-phosphate
  modified_base 12: mod_base = OTHER; note = 2'-O-methyladenosine-3'-phosphate
  modified_base 13: mod_base = OTHER; note = 2'-O-methyladenosine-3'-phosphate
  modified_base 14: mod_base = OTHER; note = 2'-O-methyladenosine-3'-phosphate
  modified_base 15: mod_base = OTHER; note = 2'-O-methyluridine-3'-phosphate
  modified_base 16: mod_base = OTHER; note = 2'-O-methylcytidine-3'-phosphate
  modified_base 17: mod_base = OTHER; note = 2'-O-methyluridine-3'-phosphate
  modified_base 18: mod_base = OTHER; note = 2'-O-methyluridine-3'-phosphate
  modified_base 19: mod_base = OTHER; note = 2'-O-methylguanosine-3'-phosphorothioate
  modified_base 20: mod_base = OTHER; note = 2'-O-methylcytidine-3'-phosphorothioate
  modified_base 21: mod_base = OTHER; note = 2'-O-methyladenosine-3'-phosphate
ggattgattcgaaatcttgca

SEQ ID NO: 774 - RNA, 21 nt, synthetic construct
  source 1..21: mol_type = other RNA
  modified_base 1: mod_base = OTHER; note = 2'-O-methylguanosine-3'-phosphorothioate
  modified_base 2: mod_base = OTHER; note = 2'-O-methylguanosine-3'-phosphorothioate
  modified_base 3: mod_base = OTHER; note = 2'-O-methyladenosine-3'-phosphate
  modified_base 4: mod_base = OTHER; note = 2'-O-methyluridine-3'-phosphate
  modified_base 5: mod_base = OTHER; note = 2'-O-methyluridine-3'-phosphate
  modified_base 6: mod_base = OTHER; note = 2'-O-methylguanosine-3'-phosphate
  modified_base 7: mod_base = OTHER; note = 2'-O-methyladenosine-3'-phosphate
  modified_base 8: mod_base = OTHER; note = 2'-O-methyluridine-3'-phosphate
  modified_base 9: mod_base = OTHER; note = 2'-fluorouridine-3'-phosphate
  modified_base 10: mod_base = OTHER; note = 2'-fluorocytidine-3'-phosphate
  modified_base 11: mod_base = OTHER; note = 2'-fluoroguanosine-3'-phosphate
  modified_base 12: mod_base = OTHER; note = 2'-O-methyladenosine-3'-phosphate
  modified_base 13: mod_base = OTHER; note = 2'-O-methyladenosine-3'-phosphate
  modified_base 14: mod_base = OTHER; note = 2'-O-methyladenosine-3'-phosphate
  modified_base 15: mod_base = OTHER; note = 2'-O-methyluridine-3'-phosphate
  modified_base 16: mod_base = OTHER; note = 2'-O-methylcytidine-3'-phosphate
  modified_base 17: mod_base = OTHER; note = 2'-O-methyluridine-3'-phosphate
  modified_base 18: mod_base = OTHER; note = 2'-O-methyluridine-3'-phosphate
  modified_base 19: mod_base = OTHER; note = 2'-O-methylguanosine-3'-phosphorothioate
  modified_base 20: mod_base = OTHER; note = 2'-O-methylcytidine-3'-phosphorothioate
  modified_base 21: mod_base = OTHER; note = 2'-O-methyladenosine-3'-phosphate
ggattgattcgaaatcttgca

SEQ ID NO: 775 - RNA, 21 nt, synthetic construct
  source 1..21: mol_type = other RNA
  modified_base 1: mod_base = OTHER; note = 2'-O-methyluridine-3'-phosphorothioate
  modified_base 2: mod_base = OTHER; note = 2'-O-methyluridine-3'-phosphorothioate
  modified_base 3: mod_base = OTHER; note = 2'-O-methylguanosine-3'-phosphate
  modified_base 4: mod_base = OTHER; note = 2'-O-methyladenosine-3'-phosphate
  modified_base 5: mod_base = OTHER; note = 2'-O-methyluridine-3'-phosphate
  modified_base 6: mod_base = OTHER; note = 2'-O-methyluridine-3'-phosphate
  modified_base 7: mod_base = OTHER; note = 2'-fluorocytidine-3'-phosphate
  modified_base 8: mod_base = OTHER; note = 2'-O-methylguanosine-3'-phosphate
  modified_base 9: mod_base = OTHER; note = 2'-fluoroadenosine-3'-phosphate
  modified_base 10: mod_base = OTHER; note = 2'-fluoroadenosine-3'-phosphate
  modified_base 11: mod_base = OTHER; note = 2'-fluoroadenosine-3'-phosphate
  modified_base 12: mod_base = OTHER; note = 2'-O-methyluridine-3'-phosphate
  modified_base 13: mod_base = OTHER; note = 2'-O-methylcytidine-3'-phosphate
  modified_base 14: mod_base = OTHER; note = 2'-O-methyluridine-3'-phosphate
  modified_base 15: mod_base = OTHER; note = 2'-O-methyluridine-3'-phosphate
  modified_base 16: mod_base = OTHER; note = 2'-O-methylguanosine-3'-phosphate
  modified_base 17: mod_base = OTHER; note = 2'-O-methylcytidine-3'-phosphate
  modified_base 18: mod_base = OTHER; note = 2'-O-methylcytidine-3'-phosphate
  modified_base 19: mod_base = OTHER; note = 2'-O-methylcytidine-3'-phosphorothioate
  modified_base 20: mod_base = OTHER; note = 2'-O-methyluridine-3'-phosphorothioate
  modified_base 21: mod_base = OTHER; note = 2'-O-methyladenosine-3'-phosphate
ttgattcgaaatcttgcccta

SEQ ID NO: 776 - RNA, 21 nt, synthetic construct
  source 1..21: mol_type = other RNA
  modified_base 1: mod_base = OTHER; note = 2'-O-methyladenosine-3'-phosphorothioate
  modified_base 2: mod_base = OTHER; note = 2'-O-methyluridine-3'-phosphorothioate
  modified_base 3: mod_base = OTHER; note = 2'-O-methyluridine-3'-phosphate
  modified_base 4: mod_base = OTHER; note = 2'-O-methylcytidine-3'-phosphate
  modified_base 5: mod_base = OTHER; note = 2'-O-methylcytidine-3'-phosphate
  modified_base 6: mod_base = OTHER; note = 2'-O-methyladenosine-3'-phosphate
  modified_base 7: mod_base = OTHER; note = 2'-fluorocytidine-3'-phosphate
  modified_base 8: mod_base = OTHER; note = 2'-O-methylguanosine-3'-phosphate
  modified_base 9: mod_base = OTHER; note = 2'-fluoroadenosine-3'-phosphate
  modified_base 10: mod_base = OTHER; note = 2'-fluorocytidine-3'-phosphate
  modified_base 11: mod_base = OTHER; note = 2'-fluorouridine-3'-phosphate
  modified_base 12: mod_base = OTHER; note = 2'-O-methyladenosine-3'-phosphate
  modified_base 13: mod_base = OTHER; note = 2'-O-methylguanosine-3'-phosphate
  modified_base 14: mod_base = OTHER; note = 2'-O-methyluridine-3'-phosphate
  modified_base 15: mod_base = OTHER; note = 2'-O-methyluridine-3'-phosphate
  modified_base 16: mod_base = OTHER; note = 2'-O-methylcytidine-3'-phosphate
  modified_base 17: mod_base = OTHER; note = 2'-O-methyladenosine-3'-phosphate
  modified_base 18: mod_base = OTHER; note = 2'-O-methylguanosine-3'-phosphate
  modified_base 19: mod_base = OTHER; note = 2'-O-methyluridine-3'-phosphorothioate
  modified_base 20: mod_base = OTHER; note = 2'-O-methyluridine-3'-phosphorothioate
  modified_base 21: mod_base = OTHER; note = 2'-O-methyladenosine-3'-phosphate
attccacgactagttcagtta

SEQ ID NO: 777 - RNA, 21 nt, synthetic construct
  source 1..21: mol_type = other RNA
  modified_base 1: mod_base = OTHER; note = 2'-O-methylcytidine-3'-phosphorothioate
  modified_base 2: mod_base = OTHER; note = 2'-O-methylcytidine-3'-phosphorothioate
  modified_base 3: mod_base = OTHER; note = 2'-O-methyladenosine-3'-phosphate
  modified_base 4: mod_base = OTHER; note = 2'-O-methylcytidine-3'-phosphate
  modified_base 5: mod_base = OTHER; note = 2'-O-methylguanosine-3'-phosphate
  modified_base 6: mod_base = OTHER; note = 2'-O-methyladenosine-3'-phosphate
  modified_base 7: mod_base = OTHER; note = 2'-O-methylcytidine-3'-phosphate
  modified_base 8: mod_base = OTHER; note = 2'-O-methyluridine-3'-phosphate
  modified_base 9: mod_base = OTHER; note = 2'-fluoroadenosine-3'-phosphate
  modified_base 10: mod_base = OTHER; note = 2'-fluoroguanosine-3'-phosphate
  modified_base 11: mod_base = OTHER; note = 2'-fluorouridine-3'-phosphate
  modified_base 12: mod_base = OTHER; note = 2'-O-methyluridine-3'-phosphate
  modified_base 13: mod_base = OTHER; note = 2'-O-methylcytidine-3'-phosphate
  modified_base 14: mod_base = OTHER; note = 2'-O-methyladenosine-3'-phosphate
  modified_base 15: mod_base = OTHER; note = 2'-O-methylguanosine-3'-phosphate
  modified_base 16: mod_base = OTHER; note = 2'-O-methyluridine-3'-phosphate
  modified_base 17: mod_base = OTHER; note = 2'-O-methyluridine-3'-phosphate
  modified_base 18: mod_base = OTHER; note = 2'-O-methylguanosine-3'-phosphate
  modified_base 19: mod_base = OTHER; note = 2'-O-methylcytidine-3'-phosphorothioate
  modified_base 20: mod_base = OTHER; note = 2'-O-methyluridine-3'-phosphorothioate
  modified_base 21: mod_base = OTHER; note = 2'-O-methyladenosine-3'-phosphate
ccacgactagttcagttgcta

SEQ ID NO: 778 - RNA, 21 nt, synthetic construct
  source 1..21: mol_type = other RNA
  modified_base 1: mod_base = OTHER; note = 2'-O-methyluridine-3'-phosphorothioate
  modified_base 2: mod_base = OTHER; note = 2'-O-methyluridine-3'-phosphorothioate
  modified_base 3: mod_base = OTHER; note = 2'-O-methylcytidine-3'-phosphate
  modified_base 4: mod_base = OTHER; note = 2'-O-methyladenosine-3'-phosphate
  modified_base 5: mod_base = OTHER; note = 2'-O-methylguanosine-3'-phosphate
  modified_base 6: mod_base = OTHER; note = 2'-O-methyluridine-3'-phosphate
  modified_base 7: mod_base = OTHER; note = 2'-O-methyluridine-3'-phosphate
  modified_base 8: mod_base = OTHER; note = 2'-O-methylguanosine-3'-phosphate
  modified_base 9: mod_base = OTHER; note = 2'-fluorocytidine-3'-phosphate
  modified_base 10: mod_base = OTHER; note = 2'-fluorouridine-3'-phosphate
  modified_base 11: mod_base = OTHER; note = 2'-fluorouridine-3'-phosphate
  modified_base 12: mod_base = OTHER; note = 2'-O-methylguanosine-3'-phosphate
  modified_base 13: mod_base = OTHER; note = 2'-O-methyluridine-3'-phosphate
  modified_base 14: mod_base = OTHER; note = 2'-O-methyluridine-3'-phosphate
  modified_base 15: mod_base = OTHER; note = 2'-O-methylcytidine-3'-phosphate
  modified_base 16: mod_base = OTHER; note = 2'-O-methylguanosine-3'-phosphate
  modified_base 17: mod_base = OTHER; note = 2'-O-methyluridine-3'-phosphate
  modified_base 18: mod_base = OTHER; note = 2'-O-methylguanosine-3'-phosphate
  modified_base 19: mod_base = OTHER; note = 2'-O-methylcytidine-3'-phosphorothioate
  modified_base 20: mod_base = OTHER; note = 2'-O-methyladenosine-3'-phosphorothioate
  modified_base 21: mod_base = OTHER; note = 2'-O-methyladenosine-3'-phosphate
ttcagttgcttgttcgtgcaa

SEQ ID NO: 779 - RNA, 21 nt, synthetic construct
  source 1..21: mol_type = other RNA
  modified_base 1: mod_base = OTHER; note = 2'-O-methylguanosine-3'-phosphorothioate
  modified_base 2: mod_base = OTHER; note = 2'-O-methylguanosine-3'-phosphorothioate
  modified_base 3: mod_base = OTHER; note = 2'-O-methyladenosine-3'-phosphate
  modified_base 4: mod_base = OTHER; note = 2'-O-methylcytidine-3'-phosphate
  modified_base 5: mod_base = OTHER; note = 2'-O-methyladenosine-3'-phosphate
  modified_base 6: mod_base = OTHER; note = 2'-O-methylcytidine-3'-phosphate
  modified_base 7: mod_base = OTHER; note = 2'-O-methyladenosine-3'-phosphate
  modified_base 8: mod_base = OTHER; note = 2'-O-methylguanosine-3'-phosphate
  modified_base 9: mod_base = OTHER; note = 2'-fluorocytidine-3'-phosphate
  modified_base 10: mod_base = OTHER; note = 2'-fluoroadenosine-3'-phosphate
  modified_base 11: mod_base = OTHER; note = 2'-fluoroguanosine-3'-phosphate
  modified_base 12: mod_base = OTHER; note = 2'-O-methylcytidine-3'-phosphate
  modified_base 13: mod_base = OTHER; note = 2'-O-methyladenosine-3'-phosphate
  modified_base 14: mod_base = OTHER; note = 2'-O-methyladenosine-3'-phosphate
  modified_base 15: mod_base = OTHER; note = 2'-O-methyluridine-3'-phosphate
  modified_base 16: mod_base = OTHER; note = 2'-O-methyluridine-3'-phosphate
  modified_base 17: mod_base = OTHER; note = 2'-O-methyluridine-3'-phosphate
  modified_base 18: mod_base = OTHER; note = 2'-O-methylguanosine-3'-phosphate
  modified_base 19: mod_base = OTHER; note = 2'-O-methyluridine-3'-phosphorothioate
  modified_base 20: mod_base = OTHER; note = 2'-O-methylguanosine-3'-phosphorothioate
  modified_base 21: mod_base = OTHER; note = 2'-O-methyladenosine-3'-phosphate
ggacacagcagcaatttgtga

SEQ ID NO: 780 - RNA, 21 nt, synthetic construct
  source 1..21: mol_type = other RNA
  modified_base 1: mod_base = OTHER; note = 2'-O-methyladenosine-3'-phosphorothioate
  modified_base 2: mod_base = OTHER; note = 2'-O-methyluridine-3'-phosphorothioate
  modified_base 3: mod_base = OTHER; note = 2'-O-methylcytidine-3'-phosphate
  modified_base 4: mod_base = OTHER; note = 2'-O-methylcytidine-3'-phosphate
  modified_base 5: mod_base = OTHER; note = 2'-O-methyluridine-3'-phosphate
  modified_base 6: mod_base = OTHER; note = 2'-O-methyladenosine-3'-phosphate
  modified_base 7: mod_base = OTHER; note = 2'-fluoroguanosine-3'-phosphate
  modified_base 8: mod_base = OTHER; note = 2'-O-methylcytidine-3'-phosphate
  modified_base 9: mod_base = OTHER; note = 2'-fluorouridine-3'-phosphate
  modified_base 10: mod_base = OTHER; note = 2'-fluorocytidine-3'-phosphate
  modified_base 11: mod_base = OTHER; note = 2'-fluoroguanosine-3'-phosphate
  modified_base 12: mod_base = OTHER; note = 2'-O-methylguanosine-3'-phosphate
  modified_base 13: mod_base = OTHER; note = 2'-O-methylguanosine-3'-phosphate
  modified_base 14: mod_base = OTHER; note = 2'-O-methyladenosine-3'-phosphate
  modified_base 15: mod_base = OTHER; note = 2'-O-methyluridine-3'-phosphate
  modified_base 16: mod_base = OTHER; note = 2'-O-methylguanosine-3'-phosphate
  modified_base 17: mod_base = OTHER; note = 2'-O-methyluridine-3'-phosphate
  modified_base 18: mod_base = OTHER; note = 2'-O-methyluridine-3'-phosphate
  modified_base 19: mod_base = OTHER; note = 2'-O-methylcytidine-3'-phosphorothioate
  modified_base 20: mod_base = OTHER; note = 2'-O-methyladenosine-3'-phosphorothioate
  modified_base 21: mod_base = OTHER; note = 2'-O-methyladenosine-3'-phosphate
atcctagctcgggatgttcaa

SEQ ID NO: 781 - RNA, 21 nt, synthetic construct
  source 1..21: mol_type = other RNA
  modified_base 1: mod_base = OTHER; note = 2'-O-methyladenosine-3'-phosphorothioate
  modified_base 2: mod_base = OTHER; note = 2'-O-methylguanosine-3'-phosphorothioate
  modified_base 3: mod_base = OTHER; note = 2'-O-methylcytidine-3'-phosphate
  modified_base 4: mod_base = OTHER; note = 2'-O-methyluridine-3'-phosphate
  modified_base 5: mod_base = OTHER; note = 2'-O-methylcytidine-3'-phosphate
  modified_base 6: mod_base = OTHER; note = 2'-O-methylguanosine-3'-phosphate
  modified_base 7: mod_base = OTHER; note = 2'-fluoroguanosine-3'-phosphate
  modified_base 8: mod_base = OTHER; note = 2'-O-methylguanosine-3'-phosphate
  modified_base 9: mod_base = OTHER; note = 2'-fluoroadenosine-3'-phosphate
  modified_base 10: mod_base = OTHER; note = 2'-fluorouridine-3'-phosphate
  modified_base 11: mod_base = OTHER; note = 2'-fluoroguanosine-3'-phosphate
  modified_base 12: mod_base = OTHER; note = 2'-O-methyluridine-3'-phosphate
  modified_base 13: mod_base = OTHER; note = 2'-O-methyluridine-3'-phosphate
  modified_base 14: mod_base = OTHER; note = 2'-O-methylcytidine-3'-phosphate
  modified_base 15: mod_base = OTHER; note = 2'-O-methyladenosine-3'-phosphate
  modified_base 16: mod_base = OTHER; note = 2'-O-methylcytidine-3'-phosphate
  modified_base 17: mod_base = OTHER; note = 2'-O-methyladenosine-3'-phosphate
  modified_base 18: mod_base = OTHER; note = 2'-O-methyladenosine-3'-phosphate
  modified_base 19: mod_base = OTHER; note = 2'-O-methylcytidine-3'-phosphorothioate
  modified_base 20: mod_base = OTHER; note = 2'-O-methylcytidine-3'-phosphorothioate
  modified_base 21: mod_base = OTHER; note = 2'-O-methyladenosine-3'-phosphate
agctcgggatgttcacaacca

SEQ ID NO: 782 - RNA, 21 nt, synthetic construct
  source 1..21: mol_type = other RNA
  modified_base 1: mod_base = OTHER; note = 2'-O-methylguanosine-3'-phosphorothioate
  modified_base 2: mod_base = OTHER; note = 2'-O-methyladenosine-3'-phosphorothioate
  modified_base 3: mod_base = OTHER; note = 2'-O-methyluridine-3'-phosphate
  modified_base 4: mod_base = OTHER; note = 2'-O-methylguanosine-3'-phosphate
  modified_base 5: mod_base = OTHER; note = 2'-O-methyluridine-3'-phosphate
  modified_base 6: mod_base = OTHER; note = 2'-O-methyluridine-3'-phosphate
  modified_base 7: mod_base = OTHER; note = 2'-O-methylcytidine-3'-phosphate
  modified_base 8: mod_base = OTHER; note = 2'-O-methyladenosine-3'-phosphate
  modified_base 9: mod_base = OTHER; note = 2'-fluorocytidine-3'-phosphate
  modified_base 10: mod_base = OTHER; note = 2'-fluoroadenosine-3'-phosphate
  modified_base 11: mod_base = OTHER; note = 2'-fluoroadenosine-3'-phosphate
  modified_base 12: mod_base = OTHER; note = 2'-O-methylcytidine-3'-phosphate
  modified_base 13: mod_base = OTHER; note = 2'-O-methylcytidine-3'-phosphate
  modified_base 14: mod_base = OTHER; note = 2'-O-methylguanosine-3'-phosphate
  modified_base 15: mod_base = OTHER; note = 2'-O-methyladenosine-3'-phosphate
  modified_base 16: mod_base = OTHER; note = 2'-O-methyladenosine-3'-phosphate
  modified_base 17: mod_base = OTHER; note = 2'-O-methyluridine-3'-phosphate
  modified_base 18: mod_base = OTHER; note = 2'-O-methyluridine-3'-phosphate
  modified_base 19: mod_base = OTHER; note = 2'-O-methylguanosine-3'-phosphorothioate
  modified_base 20: mod_base = OTHER; note = 2'-O-methyluridine-3'-phosphorothioate
  modified_base 21: mod_base = OTHER; note = 2'-O-methyladenosine-3'-phosphate
gatgttcacaaccgaattgta

SEQ ID NO: 783 - RNA, 21 nt, synthetic construct
  source 1..21: mol_type = other RNA
  modified_base 1: mod_base = OTHER; note = 2'-O-methyluridine-3'-phosphorothioate
  modified_base 2: mod_base = OTHER; note = 2'-O-methyladenosine-3'-phosphorothioate
  modified_base 3: mod_base = OTHER; note = 2'-O-methyluridine-3'-phosphate
  modified_base 4: mod_base = OTHER; note = 2'-O-methylcytidine-3'-phosphate
  modified_base 5: mod_base = OTHER; note = 2'-O-methyladenosine-3'-phosphate
  modified_base 6: mod_base = OTHER; note = 2'-O-methylguanosine-3'-phosphate
  modified_base 7: mod_base = OTHER; note = 2'-fluoroadenosine-3'-phosphate
  modified_base 8: mod_base = OTHER; note = 2'-O-methylguanosine-3'-phosphate
  modified_base 9: mod_base = OTHER; note = 2'-fluoroguanosine-3'-phosphate
  modified_base 10: mod_base = OTHER; note = 2'-fluoroadenosine-3'-phosphate
  modified_base 11: mod_base = OTHER; note = 2'-fluorocytidine-3'-phosphate
  modified_base 12: mod_base = OTHER; note = 2'-O-methyluridine-3'-phosphate
  modified_base 13: mod_base = OTHER; note = 2'-O-methyladenosine-3'-phosphate
  modified_base 14: mod_base = OTHER; note = 2'-O-methyladenosine-3'-phosphate
  modified_base 15: mod_base = OTHER; note = 2'-O-methyladenosine-3'-phosphate
  modified_base 16: mod_base = OTHER; note = 2'-O-methyluridine-3'-phosphate
  modified_base 17: mod_base = OTHER; note = 2'-O-methyladenosine-3'-phosphate
  modified_base 18: mod_base = OTHER; note = 2'-O-methylcytidine-3'-phosphate
  modified_base 19: mod_base = OTHER; note = 2'-O-methylcytidine-3'-phosphorothioate
  modified_base 20: mod_base = OTHER; note = 2'-O-methyladenosine-3'-phosphorothioate
  modified_base 21: mod_base = OTHER; note = 2'-O-methyladenosine-3'-phosphate
tatcagaggactaaataccaa

SEQ ID NO: 784 - RNA, 21 nt, synthetic construct
  source 1..21: mol_type = other RNA
  modified_base 1: mod_base = OTHER; note = 2'-O-methyladenosine-3'-phosphorothioate
  modified_base 2: mod_base = OTHER; note = 2'-O-methyluridine-3'-phosphorothioate
  modified_base 3: mod_base = OTHER; note = 2'-O-methylcytidine-3'-phosphate
  modified_base 4: mod_base = OTHER; note = 2'-O-methyladenosine-3'-phosphate
  modified_base 5: mod_base = OTHER; note = 2'-O-methylguanosine-3'-phosphate
  modified_base 6: mod_base = OTHER; note = 2'-O-methyladenosine-3'-phosphate
  modified_base 7: mod_base = OTHER; note = 2'-fluoroguanosine-3'-phosphate
  modified_base 8: mod_base = OTHER; note = 2'-O-methylguanosine-3'-phosphate
  modified_base 9: mod_base = OTHER; note = 2'-fluoroadenosine-3'-phosphate
  modified_base 10: mod_base = OTHER; note = 2'-fluorocytidine-3'-phosphate
  modified_base 11: mod_base = OTHER; note = 2'-fluorouridine-3'-phosphate
  modified_base 12: mod_base = OTHER; note = 2'-O-methyladenosine-3'-phosphate
  modified_base 13: mod_base = OTHER; note = 2'-O-methyladenosine-3'-phosphate
  modified_base 14: mod_base = OTHER; note = 2'-O-methyladenosine-3'-phosphate
  modified_base 15: mod_base = OTHER; note = 2'-O-methyluridine-3'-phosphate
  modified_base 16: mod_base = OTHER; note = 2'-O-methyladenosine-3'-phosphate
  modified_base 17: mod_base = OTHER; note = 2'-O-methylcytidine-3'-phosphate
  modified_base 18: mod_base = OTHER; note = 2'-O-methylcytidine-3'-phosphate
  modified_base 19: mod_base = OTHER; note = 2'-O-methyladenosine-3'-phosphorothioate
  modified_base 20: mod_base = OTHER; note = 2'-O-methyluridine-3'-phosphorothioate
  modified_base 21: mod_base = OTHER; note = 2'-O-methyladenosine-3'-phosphate
atcagaggactaaataccata

SEQ ID NO: 785 - RNA, 21 nt, synthetic construct
  source 1..21: mol_type = other RNA
  modified_base 1: mod_base = OTHER; note = 2'-O-methyluridine-3'-phosphorothioate
  modified_base 2: mod_base = OTHER; note = 2'-O-methylcytidine-3'-phosphorothioate
  modified_base 3: mod_base = OTHER; note = 2'-O-methyladenosine-3'-phosphate
  modified_base 4: mod_base = OTHER; note = 2'-O-methylguanosine-3'-phosphate
  modified_base 5: mod_base = OTHER; note = 2'-O-methyladenosine-3'-phosphate
  modified_base 6: mod_base = OTHER; note = 2'-O-methylguanosine-3'-phosphate
  modified_base 7: mod_base = OTHER; note = 2'-fluoroguanosine-3'-phosphate
  modified_base 8: mod_base = OTHER; note = 2'-O-methyladenosine-3'-phosphate
  modified_base 9: mod_base = OTHER; note = 2'-fluorocytidine-3'-phosphate
  modified_base 10: mod_base = OTHER; note = 2'-fluorouridine-3'-phosphate
  modified_base 11: mod_base = OTHER; note = 2'-fluoroadenosine-3'-phosphate
  modified_base 12: mod_base = OTHER; note = 2'-O-methyladenosine-3'-phosphate
  modified_base 13: mod_base = OTHER; note = 2'-O-methyladenosine-3'-phosphate
  modified_base 14: mod_base = OTHER; note = 2'-O-methyluridine-3'-phosphate
  modified_base 15: mod_base = OTHER; note = 2'-O-methyladenosine-3'-phosphate
  modified_base 16: mod_base = OTHER; note = 2'-O-methylcytidine-3'-phosphate
  modified_base 17: mod_base = OTHER; note = 2'-O-methylcytidine-3'-phosphate
  modified_base 18: mod_base = OTHER; note = 2'-O-methyladenosine-3'-phosphate
  modified_base 19: mod_base = OTHER; note = 2'-O-methyluridine-3'-phosphorothioate
  modified_base 20: mod_base = OTHER; note = 2'-O-methyluridine-3'-phosphorothioate
  modified_base 21: mod_base = OTHER; note = 2'-O-methyladenosine-3'-phosphate
tcagaggactaaataccatta

SEQ ID NO: 786 - RNA, 21 nt, synthetic construct
  source 1..21: mol_type = other RNA
  modified_base 1: mod_base = OTHER; note = 2'-O-methylguanosine-3'-phosphorothioate
  modified_base 2: mod_base = OTHER; note = 2'-O-methyladenosine-3'-phosphorothioate
  modified_base 3: mod_base = OTHER; note = 2'-O-methylguanosine-3'-phosphate
  modified_base 4: mod_base = OTHER; note = 2'-O-methylguanosine-3'-phosphate
  modified_base 5: mod_base = OTHER; note = 2'-O-methyladenosine-3'-phosphate
  modified_base 6: mod_base = OTHER; note = 2'-O-methylcytidine-3'-phosphate
  modified_base 7: mod_base = OTHER; note = 2'-fluorouridine-3'-phosphate
  modified_base 8: mod_base = OTHER; note = 2'-O-methyladenosine-3'-phosphate
  modified_base 9: mod_base = OTHER; note = 2'-fluoroadenosine-3'-phosphate
  modified_base 10: mod_base = OTHER; note = 2'-fluoroadenosine-3'-phosphate
  modified_base 11: mod_base = OTHER; note = 2'-fluorouridine-3'-phosphate
  modified_base 12: mod_base = OTHER; note = 2'-O-methyladenosine-3'-phosphate
  modified_base 13: mod_base = OTHER; note = 2'-O-methylcytidine-3'-phosphate
  modified_base 14: mod_base = OTHER; note = 2'-O-methylcytidine-3'-phosphate
  modified_base 15: mod_base = OTHER; note = 2'-O-methyladenosine-3'-phosphate
  modified_base 16: mod_base = OTHER; note = 2'-O-methyluridine-3'-phosphate
  modified_base 17: mod_base = OTHER; note = 2'-O-methyluridine-3'-phosphate
  modified_base 18: mod_base = OTHER; note = 2'-O-methylcytidine-3'-phosphate
  modified_base 19: mod_base = OTHER; note = 2'-O-methylcytidine-3'-phosphorothioate
  modified_base 20: mod_base = OTHER; note = 2'-O-methyladenosine-3'-phosphorothioate
  modified_base 21: mod_base = OTHER; note = 2'-O-methyladenosine-3'-phosphate
gaggactaaataccattccaa

SEQ ID NO: 787 - RNA, 21 nt, synthetic construct
  source 1..21: mol_type = other RNA
  modified_base 1: mod_base = OTHER; note = 2'-O-methylguanosine-3'-phosphorothioate
  modified_base 2: mod_base = OTHER; note = 2'-O-methyladenosine-3'-phosphorothioate
  modified_base 3: mod_base = OTHER; note = 2'-O-methylguanosine-3'-phosphate
  modified_base 4: mod_base = OTHER; note = 2'-O-methylguanosine-3'-phosphate
  modified_base 5: mod_base = OTHER; note = 2'-O-methyladenosine-3'-phosphate
  modified_base 6: mod_base = OTHER; note = 2'-O-methylcytidine-3'-phosphate
  modified_base 7: mod_base = OTHER; note = 2'-O-methyluridine-3'-phosphate
  modified_base 8: mod_base = OTHER; note = 2'-O-methyladenosine-3'-phosphate
  modified_base 9: mod_base = OTHER; note = 2'-fluoroadenosine-3'-phosphate
  modified_base 10: mod_base = OTHER; note = 2'-fluoroadenosine-3'-phosphate
  modified_base 11: mod_base = OTHER; note = 2'-fluorouridine-3'-phosphate
  modified_base 12: mod_base = OTHER; note = 2'-O-methyladenosine-3'-phosphate
  modified_base 13: mod_base = OTHER; note = 2'-O-methylcytidine-3'-phosphate
  modified_base 14: mod_base = OTHER; note = 2'-O-methylcytidine-3'-phosphate
  modified_base 15: mod_base = OTHER; note = 2'-O-methyladenosine-3'-phosphate
  modified_base 16: mod_base = OTHER; note = 2'-O-methyluridine-3'-phosphate
  modified_base 17: mod_base = OTHER; note = 2'-O-methyluridine-3'-phosphate
  modified_base 18: mod_base = OTHER; note = 2'-O-methylcytidine-3'-phosphate
  modified_base 19: mod_base = OTHER; note = 2'-O-methylcytidine-3'-phosphorothioate
  modified_base 20: mod_base = OTHER; note = 2'-O-methyladenosine-3'-phosphorothioate
  modified_base 21: mod_base = OTHER; note = 2'-O-methyladenosine-3'-phosphate
gaggactaaataccattccaa

SEQ ID NO: 788 - RNA, 21 nt, synthetic construct
  source 1..21: mol_type = other RNA
  modified_base 1: mod_base = OTHER; note = 2'-O-methylguanosine-3'-phosphorothioate
  modified_base 2: mod_base = OTHER; note = 2'-O-methylguanosine-3'-phosphorothioate
  modified_base 3: mod_base = OTHER; note = 2'-O-methyladenosine-3'-phosphate
  modified_base 4: mod_base = OTHER; note = 2'-O-methylcytidine-3'-phosphate
  modified_base 5: mod_base = OTHER; note = 2'-O-methyluridine-3'-phosphate
  modified_base 6: mod_base = OTHER; note = 2'-O-methyladenosine-3'-phosphate
  modified_base 7: mod_base = OTHER; note = 2'-O-methyladenosine-3'-phosphate
  modified_base 8: mod_base = OTHER; note = 2'-O-methyladenosine-3'-phosphate
  modified_base 9: mod_base = OTHER; note = 2'-fluorouridine-3'-phosphate
  modified_base 10: mod_base = OTHER; note = 2'-fluoroadenosine-3'-phosphate
  modified_base 11: mod_base = OTHER; note = 2'-fluorocytidine-3'-phosphate
  modified_base 12: mod_base = OTHER; note = 2'-O-methylcytidine-3'-phosphate
  modified_base 13: mod_base = OTHER; note = 2'-O-methyladenosine-3'-phosphate
  modified_base 14: mod_base = OTHER; note = 2'-O-methyluridine-3'-phosphate
  modified_base 15: mod_base = OTHER; note = 2'-O-methyluridine-3'-phosphate
  modified_base 16: mod_base = OTHER; note = 2'-O-methylcytidine-3'-phosphate
  modified_base 17: mod_base = OTHER; note = 2'-O-methylcytidine-3'-phosphate
  modified_base 18: mod_base = OTHER; note = 2'-O-methyladenosine-3'-phosphate
  modified_base 19: mod_base = OTHER; note = 2'-O-methyluridine-3'-phosphorothioate
  modified_base 20: mod_base = OTHER; note = 2'-O-methyluridine-3'-phosphorothioate
  modified_base 21: mod_base = OTHER; note = 2'-O-methyladenosine-3'-phosphate
ggactaaataccattccatta

SEQ ID NO: 789 - RNA, 21 nt, synthetic construct
  source 1..21: mol_type = other RNA
  modified_base 1: mod_base = OTHER; note = 2'-O-methyladenosine-3'-phosphorothioate
  modified_base 2: mod_base = OTHER; note = 2'-O-methylcytidine-3'-phosphorothioate
  modified_base 3: mod_base = OTHER; note = 2'-O-methyluridine-3'-phosphate
  modified_base 4: mod_base = OTHER; note = 2'-O-methyladenosine-3'-phosphate
  modified_base 5: mod_base = OTHER; note = 2'-O-methyladenosine-3'-phosphate
  modified_base 6: mod_base = OTHER; note = 2'-O-methyladenosine-3'-phosphate
  modified_base 7: mod_base = OTHER; note = 2'-O-methyluridine-3'-phosphate
  modified_base 8: mod_base = OTHER; note = 2'-O-methyladenosine-3'-phosphate
  modified_base 9: mod_base = OTHER; note = 2'-fluorocytidine-3'-phosphate
  modified_base 10: mod_base = OTHER; note = 2'-fluorocytidine-3'-phosphate
  modified_base 11: mod_base = OTHER; note = 2'-fluoroadenosine-3'-phosphate
  modified_base 12: mod_base = OTHER; note = 2'-O-methyluridine-3'-phosphate
  modified_base 13: mod_base = OTHER; note = 2'-O-methyluridine-3'-phosphate
  modified_base 14: mod_base = OTHER; note = 2'-O-methylcytidine-3'-phosphate
  modified_base 15: mod_base = OTHER; note = 2'-O-methylcytidine-3'-phosphate
  modified_base 16: mod_base = OTHER; note = 2'-O-methyladenosine-3'-phosphate
  modified_base 17: mod_base = OTHER; note = 2'-O-methyluridine-3'-phosphate
  modified_base 18: mod_base = OTHER; note = 2'-O-methyluridine-3'-phosphate
  modified_base 19: mod_base = OTHER; note = 2'-O-methylguanosine-3'-phosphorothioate
  modified_base 20: mod_base = OTHER; note = 2'-O-methyluridine-3'-phosphorothioate
  modified_base 21: mod_base = OTHER; note = 2'-O-methyladenosine-3'-phosphate
actaaataccattccattgta

SEQ ID NO: 790 - RNA, 21 nt, synthetic construct
  source 1..21: mol_type = other RNA
  modified_base 1: mod_base = OTHER; note = 2'-O-methylcytidine-3'-phosphorothioate
  modified_base 2: mod_base = OTHER; note = 2'-O-methyluridine-3'-phosphorothioate
  modified_base 3: mod_base = OTHER; note = 2'-O-methyladenosine-3'-phosphate
  modified_base 4: mod_base = OTHER; note = 2'-O-methyladenosine-3'-phosphate
  modified_base 5: mod_base = OTHER; note = 2'-O-methyladenosine-3'-phosphate
  modified_base 6: mod_base = OTHER; note = 2'-O-methyluridine-3'-phosphate
  modified_base 7: mod_base = OTHER; note = 2'-O-methyladenosine-3'-phosphate
  modified_base 8: mod_base = OTHER; note = 2'-O-methylcytidine-3'-phosphate
  modified_base 9: mod_base = OTHER; note = 2'-fluorocytidine-3'-phosphate
  modified_base 10: mod_base = OTHER; note = 2'-fluoroadenosine-3'-phosphate
  modified_base 11: mod_base = OTHER; note = 2'-fluorouridine-3'-phosphate
  modified_base 12: mod_base = OTHER; note = 2'-O-methyluridine-3'-phosphate
  modified_base 13: mod_base = OTHER; note = 2'-O-methylcytidine-3'-phosphate
  modified_base 14: mod_base = OTHER; note = 2'-O-methylcytidine-3'-phosphate
  modified_base 15: mod_base = OTHER; note = 2'-O-methyladenosine-3'-phosphate
  modified_base 16: mod_base = OTHER; note = 2'-O-methyluridine-3'-phosphate
  modified_base 17: mod_base = OTHER; note = 2'-O-methyluridine-3'-phosphate
  modified_base 18: mod_base = OTHER; note = 2'-O-methylguanosine-3'-phosphate
  modified_base 19: mod_base = OTHER; note = 2'-O-methyluridine-3'-phosphorothioate
  modified_base 20: mod_base = OTHER; note = 2'-O-methyluridine-3'-phosphorothioate
  modified_base 21: mod_base = OTHER; note = 2'-O-methyladenosine-3'-phosphate
ctaaataccattccattgtta

SEQ ID NO: 791 - RNA, 21 nt, synthetic construct
  source 1..21: mol_type = other RNA
  modified_base 1: mod_base = OTHER; note = 2'-O-methyluridine-3'-phosphorothioate
  modified_base 2: mod_base = OTHER; note = 2'-O-methyladenosine-3'-phosphorothioate
  modified_base 3: mod_base = OTHER; note = 2'-O-methyladenosine-3'-phosphate
  modified_base 4: mod_base = OTHER; note = 2'-O-methyladenosine-3'-phosphate
  modified_base 5: mod_base = OTHER; note = 2'-O-methyluridine-3'-phosphate
  modified_base 6: mod_base = OTHER; note = 2'-O-methyladenosine-3'-phosphate
  modified_base 7: mod_base = OTHER; note = 2'-O-methylcytidine-3'-phosphate
  modified_base 8: mod_base = OTHER; note = 2'-O-methylcytidine-3'-phosphate
  modified_base 9: mod_base = OTHER; note = 2'-fluoroadenosine-3'-phosphate
  modified_base 10: mod_base = OTHER; note = 2'-fluorouridine-3'-phosphate
  modified_base 11: mod_base = OTHER; note = 2'-fluorouridine-3'-phosphate
  modified_base 12: mod_base = OTHER; note = 2'-O-methylcytidine-3'-phosphate
  modified_base 13: mod_base = OTHER; note = 2'-O-methylcytidine-3'-phosphate
  modified_base 14: mod_base = OTHER; note = 2'-O-methyladenosine-3'-phosphate
  modified_base 15: mod_base = OTHER; note = 2'-O-methyluridine-3'-phosphate
  modified_base 16: mod_base = OTHER; note = 2'-O-methyluridine-3'-phosphate
  modified_base 17: mod_base = OTHER; note = 2'-O-methylguanosine-3'-phosphate
  modified_base 18: mod_base = OTHER; note = 2'-O-methyluridine-3'-phosphate
  modified_base 19: mod_base = OTHER; note = 2'-O-methyluridine-3'-phosphorothioate
  modified_base 20: mod_base = OTHER; note = 2'-O-methyluridine-3'-phosphorothioate
  modified_base 21: mod_base = OTHER; note = 2'-O-methyladenosine-3'-phosphate
taaataccattccattgttta

SEQ ID NO: 792 - RNA, 21 nt, synthetic construct
  source 1..21: mol_type = other RNA
  modified_base 1: mod_base = OTHER; note = 2'-O-methyladenosine-3'-phosphorothioate
  modified_base 2: mod_base = OTHER; note = 2'-O-methyladenosine-3'-phosphorothioate
  modified_base 3: mod_base = OTHER; note = 2'-O-methyladenosine-3'-phosphate
  modified_base 4: mod_base = OTHER; note = 2'-O-methyluridine-3'-phosphate
  modified_base 5: mod_base = OTHER; note = 2'-O-methyladenosine-3'-phosphate
  modified_base 6: mod_base = OTHER; note = 2'-O-methylcytidine-3'-phosphate
  modified_base 7: mod_base = OTHER; note = 2'-O-methylcytidine-3'-phosphate
  modified_base 8: mod_base = OTHER; note = 2'-O-methyladenosine-3'-phosphate
  modified_base 9: mod_base = OTHER; note = 2'-fluorouridine-3'-phosphate
  modified_base 10: mod_base = OTHER; note = 2'-fluorouridine-3'-phosphate
  modified_base 11: mod_base = OTHER; note = 2'-fluorocytidine-3'-phosphate
  modified_base 12: mod_base = OTHER; note = 2'-O-methylcytidine-3'-phosphate
  modified_base 13: mod_base = OTHER; note = 2'-O-methyladenosine-3'-phosphate
  modified_base 14: mod_base = OTHER; note = 2'-O-methyluridine-3'-phosphate
  modified_base 15: mod_base = OTHER; note = 2'-O-methyluridine-3'-phosphate
  modified_base 16: mod_base = OTHER; note = 2'-O-methylguanosine-3'-phosphate
  modified_base 17: mod_base = OTHER; note = 2'-O-methyluridine-3'-phosphate
  modified_base 18: mod_base = OTHER; note = 2'-O-methyluridine-3'-phosphate
  modified_base 19: mod_base = OTHER; note = 2'-O-methyluridine-3'-phosphorothioate
  modified_base 20: mod_base = OTHER; note = 2'-O-methylguanosine-3'-phosphorothioate
  modified_base 21: mod_base = OTHER; note = 2'-O-methyladenosine-3'-phosphate
aaataccattccattgtttga

SEQ ID NO: 793 - RNA, 21 nt, synthetic construct
  source 1..21: mol_type = other RNA
  modified_base 1: mod_base = OTHER; note = 2'-O-methyladenosine-3'-phosphorothioate
  modified_base 2: mod_base = OTHER; note = 2'-O-methyladenosine-3'-phosphorothioate
  modified_base 3: mod_base = OTHER; note = 2'-O-methyluridine-3'-phosphate
  modified_base 4: mod_base = OTHER; note = 2'-O-methyladenosine-3'-phosphate
  modified_base 5: mod_base = OTHER; note = 2'-O-methylcytidine-3'-phosphate
  modified_base 6: mod_base = OTHER; note = 2'-O-methylcytidine-3'-phosphate
  modified_base 7: mod_base = OTHER; note = 2'-O-methyladenosine-3'-phosphate
  modified_base 8: mod_base = OTHER; note = 2'-O-methyluridine-3'-phosphate
  modified_base 9: mod_base = OTHER; note = 2'-fluorouridine-3'-phosphate
  modified_base 10: mod_base = OTHER; note = 2'-fluorocytidine-3'-phosphate
  modified_base 11: mod_base = OTHER; note = 2'-fluorocytidine-3'-phosphate
  modified_base 12: mod_base = OTHER; note = 2'-O-methyladenosine-3'-phosphate
  modified_base 13: mod_base = OTHER; note = 2'-O-methyluridine-3'-phosphate
  modified_base 14: mod_base = OTHER; note = 2'-O-methyluridine-3'-phosphate
  modified_base 15: mod_base = OTHER; note = 2'-O-methylguanosine-3'-phosphate
  modified_base 16: mod_base = OTHER; note = 2'-O-methyluridine-3'-phosphate
  modified_base 17: mod_base = OTHER; note = 2'-O-methyluridine-3'-phosphate
  modified_base 18: mod_base = OTHER; note = 2'-O-methyluridine-3'-phosphate
  modified_base 19: mod_base = OTHER; note = 2'-O-methylguanosine-3'-phosphorothioate
  modified_base 20: mod_base = OTHER; note = 2'-O-methyluridine-3'-phosphorothioate
  modified_base 21: mod_base = OTHER; note = 2'-O-methyladenosine-3'-phosphate
aataccattccattgtttgta

SEQ ID NO: 794 - RNA, 21 nt, synthetic construct
  source 1..21: mol_type = other RNA
  modified_base 1: mod_base = OTHER; note = 2'-O-methyladenosine-3'-phosphorothioate
  modified_base 2: mod_base = OTHER; note = 2'-O-methyluridine-3'-phosphorothioate
  modified_base 3: mod_base = OTHER; note = 2'-O-methyladenosine-3'-phosphate
  modified_base 4: mod_base = OTHER; note = 2'-O-methylcytidine-3'-phosphate
  modified_base 5: mod_base = OTHER; note = 2'-O-methylcytidine-3'-phosphate
  modified_base 6: mod_base = OTHER; note = 2'-O-methyladenosine-3'-phosphate
  modified_base 7: mod_base = OTHER; note = 2'-O-methyluridine-3'-phosphate
  modified_base 8: mod_base = OTHER; note = 2'-O-methyluridine-3'-phosphate
  modified_base 9: mod_base = OTHER; note = 2'-fluorocytidine-3'-phosphate
  modified_base 10: mod_base = OTHER; note = 2'-fluorocytidine-3'-phosphate
  modified_base 11: mod_base = OTHER; note = 2'-fluoroadenosine-3'-phosphate
  modified_base 12: mod_base = OTHER; note = 2'-O-methyluridine-3'-phosphate
  modified_base 13: mod_base = OTHER; note = 2'-O-methyluridine-3'-phosphate
  modified_base 14: mod_base = OTHER; note = 2'-O-methylguanosine-3'-phosphate
  modified_base 15: mod_base = OTHER; note = 2'-O-methyluridine-3'-phosphate
  modified_base 16: mod_base = OTHER; note = 2'-O-methyluridine-3'-phosphate
  modified_base 17: mod_base = OTHER; note = 2'-O-methyluridine-3'-phosphate
  modified_base 18: mod_base = OTHER; note = 2'-O-methylguanosine-3'-phosphate
  modified_base 19: mod_base = OTHER; note = 2'-O-methyluridine-3'-phosphorothioate
  modified_base 20: mod_base = OTHER; note = 2'-O-methylguanosine-3'-phosphorothioate
  modified_base 21: mod_base = OTHER; note = 2'-O-methyladenosine-3'-phosphate
ataccattccattgtttgtga

SEQ ID NO: 795 - RNA, 21 nt, synthetic construct
  source 1..21: mol_type = other RNA
  modified_base 1: mod_base = OTHER; note = 2'-O-methyluridine-3'-phosphorothioate
  modified_base 2: mod_base = OTHER; note = 2'-O-methyladenosine-3'-phosphorothioate
  modified_base 3: mod_base = OTHER; note = 2'-O-methylcytidine-3'-phosphate
  modified_base 4: mod_base = OTHER; note = 2'-O-methylcytidine-3'-phosphate
  modified_base 5: mod_base = OTHER; note = 2'-O-methyladenosine-3'-phosphate
  modified_base 6: mod_base = OTHER; note = 2'-O-methyluridine-3'-phosphate
  modified_base 7: mod_base = OTHER; note = 2'-O-methyluridine-3'-phosphate
  modified_base 8: mod_base = OTHER; note = 2'-O-methylcytidine-3'-phosphate
  modified_base 9: mod_base = OTHER; note = 2'-fluorocytidine-3'-phosphate
  modified_base 10: mod_base = OTHER; note = 2'-fluoroadenosine-3'-phosphate
  modified_base 11: mod_base = OTHER; note = 2'-fluorouridine-3'-phosphate
  modified_base 12: mod_base = OTHER; note = 2'-O-methyluridine-3'-phosphate
  modified_base 13: mod_base = OTHER; note = 2'-O-methylguanosine-3'-phosphate
  modified_base 14: mod_base = OTHER; note = 2'-O-methyluridine-3'-phosphate
  modified_base 15: mod_base = OTHER; note = 2'-O-methyluridine-3'-phosphate
  modified_base 16: mod_base = OTHER; note = 2'-O-methyluridine-3'-phosphate
  modified_base 17: mod_base = OTHER; note = 2'-O-methylguanosine-3'-phosphate
  modified_base 18: mod_base = OTHER; note = 2'-O-methyluridine-3'-phosphate
  modified_base 19: mod_base = OTHER; note = 2'-O-methylguanosine-3'-phosphorothioate
  modified_base 20: mod_base = OTHER; note = 2'-O-methylcytidine-3'-phosphorothioate
  modified_base 21: mod_base = OTHER; note = 2'-O-methyladenosine-3'-phosphate
taccattccattgtttgtgca

SEQ ID NO: 796 - RNA, 21 nt, synthetic construct
  source 1..21: mol_type = other RNA
  modified_base 1: mod_base = OTHER; note = 2'-O-methyladenosine-3'-phosphorothioate
  modified_base 2: mod_base = OTHER; note = 2'-O-methylcytidine-3'-phosphorothioate
  modified_base 3: mod_base = OTHER; note = 2'-O-methylcytidine-3'-phosphate
  modified_base 4: mod_base = OTHER; note = 2'-O-methyladenosine-3'-phosphate
  modified_base 5: mod_base = OTHER; note = 2'-O-methyluridine-3'-phosphate
  modified_base 6: mod_base = OTHER; note = 2'-O-methyluridine-3'-phosphate
  modified_base 7: mod_base = OTHER; note = 2'-O-methylcytidine-3'-phosphate
  modified_base 8: mod_base = OTHER; note = 2'-O-methylcytidine-3'-phosphate
  modified_base 9: mod_base = OTHER; note = 2'-fluoroadenosine-3'-phosphate
  modified_base 10: mod_base = OTHER; note = 2'-fluorouridine-3'-phosphate
  modified_base 11: mod_base = OTHER; note = 2'-fluorouridine-3'-phosphate
  modified_base 12: mod_base = OTHER; note = 2'-O-methylguanosine-3'-phosphate
  modified_base 13: mod_base = OTHER; note = 2'-O-methyluridine-3'-phosphate
  modified_base 14: mod_base = OTHER; note = 2'-O-methyluridine-3'-phosphate
  modified_base 15: mod_base = OTHER; note = 2'-O-methyluridine-3'-phosphate
  modified_base 16: mod_base = OTHER; note = 2'-O-methylguanosine-3'-phosphate
  modified_base 17: mod_base = OTHER; note = 2'-O-methyluridine-3'-phosphate
  modified_base 18: mod_base = OTHER; note = 2'-O-methylguanosine-3'-phosphate
  modified_base 19: mod_base = OTHER; note = 2'-O-methylcytidine-3'-phosphorothioate
  modified_base 20: mod_base = OTHER; note = 2'-O-methyladenosine-3'-phosphorothioate
  modified_base 21: mod_base = OTHER; note = 2'-O-methyladenosine-3'-phosphate
accattccattgtttgtgcaa

SEQ ID NO: 797 - RNA, 21 nt, synthetic construct
  source 1..21: mol_type = other RNA
  modified_base 1: mod_base = OTHER; note = 2'-O-methyladenosine-3'-phosphorothioate
  modified_base 2: mod_base = OTHER; note = 2'-O-methylcytidine-3'-phosphorothioate
  modified_base 3: mod_base = OTHER; note = 2'-O-methylcytidine-3'-phosphate
  modified_base 4: mod_base = OTHER; note = 2'-O-methyladenosine-3'-phosphate
  modified_base 5: mod_base = OTHER; note = 2'-O-methyluridine-3'-phosphate
  modified_base 6: mod_base = OTHER; note = 2'-O-methyluridine-3'-phosphate
  modified_base 7: mod_base = OTHER; note = 2'-fluorocytidine-3'-phosphate
  modified_base 8: mod_base = OTHER; note = 2'-O-methylcytidine-3'-phosphate
  modified_base 9: mod_base = OTHER; note = 2'-fluoroadenosine-3'-phosphate
  modified_base 10: mod_base = OTHER; note = 2'-fluorouridine-3'-phosphate
  modified_base 11: mod_base = OTHER; note = 2'-fluorouridine-3'-phosphate
  modified_base 12: mod_base = OTHER; note = 2'-O-methylguanosine-3'-phosphate
  modified_base 13: mod_base = OTHER; note = 2'-O-methyluridine-3'-phosphate
  modified_base 14: mod_base = OTHER; note = 2'-O-methyluridine-3'-phosphate
  modified_base 15: mod_base = OTHER; note = 2'-O-methyluridine-3'-phosphate
  modified_base 16: mod_base = OTHER; note = 2'-O-methylguanosine-3'-phosphate
  modified_base 17: mod_base = OTHER; note = 2'-O-methyluridine-3'-phosphate
  modified_base 18: mod_base = OTHER; note = 2'-O-methylguanosine-3'-phosphate
  modified_base 19: mod_base = OTHER; note = 2'-O-methylcytidine-3'-phosphorothioate
  modified_base 20: mod_base = OTHER; note = 2'-O-methyladenosine-3'-phosphorothioate
  modified_base 21: mod_base = OTHER; note = 2'-O-methyladenosine-3'-phosphate
accattccattgtttgtgcaa

SEQ ID NO: 798 - RNA, 21 nt, synthetic construct
  source 1..21: mol_type = other RNA
  modified_base 1: mod_base = OTHER; note = 2'-O-methylcytidine-3'-phosphorothioate
  modified_base 2: mod_base = OTHER; note = 2'-O-methylcytidine-3'-phosphorothioate
  modified_base 3: mod_base = OTHER; note = 2'-O-methyladenosine-3'-phosphate
  modified_base 4: mod_base = OTHER; note = 2'-O-methyluridine-3'-phosphate
  modified_base 5: mod_base = OTHER; note = 2'-O-methyluridine-3'-phosphate
  modified_base 6: mod_base = OTHER; note = 2'-O-methylcytidine-3'-phosphate
  modified_base 7: mod_base = OTHER; note = 2'-O-methylcytidine-3'-phosphate
  modified_base 8: mod_base = OTHER; note = 2'-O-methyladenosine-3'-phosphate
  modified_base 9: mod_base = OTHER; note = 2'-fluorouridine-3'-phosphate
  modified_base 10: mod_base = OTHER; note = 2'-fluorouridine-3'-phosphate
  modified_base 11: mod_base = OTHER; note = 2'-fluoroguanosine-3'-phosphate
  modified_base 12: mod_base = OTHER; note = 2'-O-methyluridine-3'-phosphate
  modified_base 13: mod_base = OTHER; note = 2'-O-methyluridine-3'-phosphate
  modified_base 14: mod_base = OTHER; note = 2'-O-methyluridine-3'-phosphate
  modified_base 15: mod_base = OTHER; note = 2'-O-methylguanosine-3'-phosphate
  modified_base 16: mod_base = OTHER; note = 2'-O-methyluridine-3'-phosphate
  modified_base 17: mod_base = OTHER; note = 2'-O-methylguanosine-3'-phosphate
  modified_base 18: mod_base = OTHER; note = 2'-O-methylcytidine-3'-phosphate
  modified_base 19: mod_base = OTHER; note = 2'-O-methyladenosine-3'-phosphorothioate
  modified_base 20: mod_base = OTHER; note = 2'-O-methylguanosine-3'-phosphorothioate
  modified_base 21: mod_base = OTHER; note = 2'-O-methyladenosine-3'-phosphate
ccattccattgtttgtgcaga

SEQ ID NO: 799 - RNA, 21 nt, synthetic construct
  source 1..21: mol_type = other RNA
  modified_base 1: mod_base = OTHER; note = 2'-O-methylcytidine-3'-phosphorothioate
  modified_base 2: mod_base = OTHER; note = 2'-O-methyladenosine-3'-phosphorothioate
  modified_base 3: mod_base = OTHER; note = 2'-O-methyluridine-3'-phosphate
  modified_base 4: mod_base = OTHER; note = 2'-O-methyluridine-3'-phosphate
  modified_base 5: mod_base = OTHER; note = 2'-O-methylcytidine-3'-phosphate
  modified_base 6: mod_base = OTHER; note = 2'-O-methylcytidine-3'-phosphate
  modified_base 7: mod_base = OTHER; note = 2'-fluoroadenosine-3'-phosphate
  modified_base 8: mod_base = OTHER; note = 2'-O-methyluridine-3'-phosphate
  modified_base 9: mod_base = OTHER; note = 2'-fluorouridine-3'-phosphate
  modified_base 10: mod_base = OTHER; note = 2'-fluoroguanosine-3'-phosphate
  modified_base 11: mod_base = OTHER; note = 2'-fluorouridine-3'-phosphate
  modified_base 12: mod_base = OTHER; note = 2'-O-methyluridine-3'-phosphate
  modified_base 13: mod_base = OTHER; note = 2'-O-methyluridine-3'-phosphate
  modified_base 14: mod_base = OTHER; note = 2'-O-methylguanosine-3'-phosphate
  modified_base 15: mod_base = OTHER; note = 2'-O-methyluridine-3'-phosphate
  modified_base 16: mod_base = OTHER; note = 2'-O-methylguanosine-3'-phosphate
  modified_base 17: mod_base = OTHER; note = 2'-O-methylcytidine-3'-phosphate
  modified_base 18: mod_base = OTHER; note = 2'-O-methyladenosine-3'-phosphate
  modified_base 19: mod_base = OTHER; note = 2'-O-methylguanosine-3'-phosphorothioate
  modified_base 20: mod_base = OTHER; note = 2'-O-methylcytidine-3'-phosphorothioate
  modified_base 21: mod_base = OTHER; note = 2'-O-methyladenosine-3'-phosphate
cattccattgtttgtgcagca

SEQ ID NO: 800 - RNA, 21 nt, synthetic construct
  source 1..21: mol_type = other RNA
  modified_base 1: mod_base = OTHER; note = 2'-O-methyluridine-3'-phosphorothioate
  modified_base 2: mod_base = OTHER; note = 2'-O-methylcytidine-3'-phosphorothioate
  modified_base 3: mod_base = OTHER; note = 2'-O-methylcytidine-3'-phosphate
  modified_base 4: mod_base = OTHER; note = 2'-O-methyladenosine-3'-phosphate
  modified_base 5: mod_base = OTHER; note = 2'-O-methyluridine-3'-phosphate
  modified_base 6: mod_base = OTHER; note = 2'-O-methyluridine-3'-phosphate
  modified_base 7: mod_base = OTHER; note = 2'-fluoroguanosine-3'-phosphate
  modified_base 8: mod_base = OTHER; note = 2'-O-methyluridine-3'-phosphate
  modified_base 9: mod_base = OTHER; note = 2'-fluorouridine-3'-phosphate
  modified_base 10: mod_base = OTHER; note = 2'-fluorouridine-3'-phosphate
  modified_base 11: mod_base = OTHER; note = 2'-fluoroguanosine-3'-phosphate
  modified_base 12: mod_base = OTHER; note = 2'-O-methyluridine-3'-phosphate
  modified_base 13: mod_base = OTHER; note = 2'-O-methylguanosine-3'-phosphate
  modified_base 14: mod_base = OTHER; note = 2'-O-methylcytidine-3'-phosphate
  modified_base 15: mod_base = OTHER; note = 2'-O-methyladenosine-3'-phosphate
  modified_base 16: mod_base = OTHER; note = 2'-O-methylguanosine-3'-phosphate
  modified_base 17: mod_base = OTHER; note = 2'-O-methylcytidine-3'-phosphate
  modified_base 18: mod_base = OTHER; note = 2'-O-methyluridine-3'-phosphate
  modified_base 19: mod_base = OTHER; note = 2'-O-methylguanosine-3'-phosphorothioate
  modified_base 20: mod_base = OTHER; note = 2'-O-methylcytidine-3'-phosphorothioate
  modified_base 21: mod_base = OTHER; note = 2'-O-methyladenosine-3'-phosphate
tccattgtttgtgcagctgca

SEQ ID NO: 801 - RNA, 21 nt, synthetic construct
  source 1..21: mol_type = other RNA
  modified_base 1: mod_base = OTHER; note = 2'-O-methylguanosine-3'-phosphorothioate
  modified_base 2: mod_base = OTHER; note = 2'-O-methyluridine-3'-phosphorothioate
  modified_base 3: mod_base = OTHER; note = 2'-O-methyluridine-3'-phosphate
  modified_base 4: mod_base = OTHER; note = 2'-O-methyluridine-3'-phosphate
  modified_base 5: mod_base = OTHER; note = 2'-O-methylguanosine-3'-phosphate
  modified_base 6: mod_base = OTHER; note = 2'-O-methyluridine-3'-phosphate
  modified_base 7: mod_base = OTHER; note = 2'-O-methylguanosine-3'-phosphate
  modified_base 8: mod_base = OTHER; note = 2'-O-methylcytidine-3'-phosphate
  modified_base 9: mod_base = OTHER; note = 2'-fluoroadenosine-3'-phosphate
  modified_base 10: mod_base = OTHER; note = 2'-fluoroguanosine-3'-phosphate
  modified_base 11: mod_base = OTHER; note = 2'-fluorocytidine-3'-phosphate
  modified_base 12: mod_base = OTHER; note = 2'-O-methyluridine-3'-phosphate
  modified_base 13: mod_base = OTHER; note = 2'-O-methylguanosine-3'-phosphate
  modified_base 14: mod_base = OTHER; note = 2'-O-methylcytidine-3'-phosphate
  modified_base 15: mod_base = OTHER; note = 2'-O-methyluridine-3'-phosphate
  modified_base 16: mod_base = OTHER; note = 2'-O-methyluridine-3'-phosphate
  modified_base 17: mod_base = OTHER; note = 2'-O-methyluridine-3'-phosphate
  modified_base 18: mod_base = OTHER; note = 2'-O-methyladenosine-3'-phosphate
  modified_base 19: mod_base = OTHER; note = 2'-O-methyluridine-3'-phosphorothioate
  modified_base 20: mod_base = OTHER; note = 2'-O-methyluridine-3'-phosphorothioate
  modified_base 21: mod_base = OTHER; note = 2'-O-methyladenosine-3'-phosphate
gtttgtgcagctgctttatta

SEQ ID NO: 802 - RNA, 21 nt, synthetic construct
  source 1..21: mol_type = other RNA
  modified_base 1: mod_base = OTHER; note = 2'-O-methylcytidine-3'-phosphorothioate
  modified_base 2: mod_base = OTHER; note = 2'-O-methyluridine-3'-phosphorothioate
  modified_base 3: mod_base = OTHER; note = 2'-O-methylcytidine-3'-phosphate
  modified_base 4: mod_base = OTHER; note = 2'-O-methylcytidine-3'-phosphate
  modified_base 5: mod_base = OTHER; note = 2'-O-methyluridine-3'-phosphate
  modified_base 6: mod_base = OTHER; note = 2'-O-methylcytidine-3'-phosphate
  modified_base 7: mod_base = OTHER; note = 2'-O-methyluridine-3'-phosphate
  modified_base 8: mod_base = OTHER; note = 2'-O-methylguanosine-3'-phosphate
  modified_base 9: mod_base = OTHER; note = 2'-fluoroadenosine-3'-phosphate
  modified_base 10: mod_base = OTHER; note = 2'-fluorocytidine-3'-phosphate
  modified_base 11: mod_base = OTHER; note = 2'-fluoroadenosine-3'-phosphate
  modified_base 12: mod_base = OTHER; note = 2'-O-methylguanosine-3'-phosphate
  modified_base 13: mod_base = OTHER; note = 2'-O-methyladenosine-3'-phosphate
  modified_base 14: mod_base = OTHER; note = 2'-O-methylguanosine-3'-phosphate
  modified_base 15: mod_base = OTHER; note = 2'-O-methyluridine-3'-phosphate
  modified_base 16: mod_base = OTHER; note = 2'-O-methyluridine-3'-phosphate
  modified_base 17: mod_base = OTHER; note = 2'-O-methyladenosine-3'-phosphate
  modified_base 18: mod_base = OTHER; note = 2'-O-methylcytidine-3'-phosphate
  modified_base 19: mod_base = OTHER; note = 2'-O-methyluridine-3'-phosphorothioate
  modified_base 20: mod_base = OTHER; note = 2'-O-methyluridine-3'-phosphorothioate
  modified_base 21: mod_base = OTHER; note = 2'-O-methyladenosine-3'-phosphate
ctcctctgacagagttactta

SEQ ID NO: 803 - RNA, 21 nt, synthetic construct
  source 1..21: mol_type = other RNA
  modified_base 1: mod_base = OTHER; note = 2'-O-methylguanosine-3'-phosphorothioate
  modified_base 2: mod_base = OTHER; note = 2'-O-methyladenosine-3'-phosphorothioate
  modified_base 3: mod_base = OTHER; note = 2'-O-methylcytidine-3'-phosphate
  modified_base 4: mod_base = OTHER; note = 2'-O-methyladenosine-3'-phosphate
  modified_base 5: mod_base = OTHER; note = 2'-O-methylguanosine-3'-phosphate
  modified_base 6: mod_base = OTHER; note = 2'-O-methyladenosine-3'-phosphate
  modified_base 7: mod_base = OTHER; note = 2'-fluoroguanosine-3'-phosphate
  modified_base 8: mod_base = OTHER; note = 2'-O-methyluridine-3'-phosphate
  modified_base 9: mod_base = OTHER; note = 2'-fluorouridine-3'-phosphate
  modified_base 10: mod_base = OTHER; note = 2'-fluoroadenosine-3'-phosphate
  modified_base 11: mod_base = OTHER; note = 2'-fluorocytidine-3'-phosphate
  modified_base 12: mod_base = OTHER; note = 2'-O-methyluridine-3'-phosphate
  modified_base 13: mod_base = OTHER; note = 2'-O-methyluridine-3'-phosphate
  modified_base 14: mod_base = OTHER; note = 2'-O-methylcytidine-3'-phosphate
  modified_base 15: mod_base = OTHER; note = 2'-O-methyladenosine-3'-phosphate
  modified_base 16: mod_base = OTHER; note = 2'-O-methylcytidine-3'-phosphate
  modified_base 17: mod_base = OTHER; note = 2'-O-methyluridine-3'-phosphate
  modified_base 18: mod_base = OTHER; note = 2'-O-methylcytidine-3'-phosphate
  modified_base 19: mod_base = OTHER; note = 2'-O-methyluridine-3'-phosphorothioate
  modified_base 20: mod_base = OTHER; note = 2'-O-methyladenosine-3'-phosphorothioate
  modified_base 21: mod_base = OTHER; note = 2'-O-methyladenosine-3'-phosphate
gacagagttacttcactctaa

SEQ ID NO: 804 - RNA, 21 nt, synthetic construct
  source 1..21: mol_type = other RNA
  modified_base 1: mod_base = OTHER; note = 2'-O-methyladenosine-3'-phosphorothioate
  modified_base 2: mod_base = OTHER; note = 2'-O-methylguanosine-3'-phosphorothioate
  modified_base 3: mod_base = OTHER; note = 2'-O-methyluridine-3'-phosphate
  modified_base 4: mod_base = OTHER; note = 2'-O-methyluridine-3'-phosphate
  modified_base 5: mod_base = OTHER; note = 2'-O-methyladenosine-3'-phosphate
  modified_base 6: mod_base = OTHER; note = 2'-O-methylcytidine-3'-phosphate
  modified_base 7: mod_base = OTHER; note = 2'-fluorouridine-3'-phosphate
  modified_base 8: mod_base = OTHER; note = 2'-O-methyluridine-3'-phosphate
  modified_base 9: mod_base = OTHER; note = 2'-fluorocytidine-3'-phosphate
  modified_base 10: mod_base = OTHER; note = 2'-fluoroadenosine-3'-phosphate
  modified_base 11: mod_base = OTHER; note = 2'-fluorocytidine-3'-phosphate
  modified_base 12: mod_base = OTHER; note = 2'-O-methyluridine-3'-phosphate
  modified_base 13: mod_base = OTHER; note = 2'-O-methylcytidine-3'-phosphate
  modified_base 14: mod_base = OTHER; note = 2'-O-methyluridine-3'-phosphate
  modified_base 15: mod_base = OTHER; note = 2'-O-methyladenosine-3'-phosphate
  modified_base 16: mod_base = OTHER; note = 2'-O-methylguanosine-3'-phosphate
  modified_base 17: mod_base = OTHER; note = 2'-O-methylguanosine-3'-phosphate
  modified_base 18: mod_base = OTHER; note = 2'-O-methyladenosine-3'-phosphate
  modified_base 19: mod_base = OTHER; note = 2'-O-methyladenosine-3'-phosphorothioate
  modified_base 20: mod_base = OTHER; note = 2'-O-methyluridine-3'-phosphorothioate
  modified_base 21: mod_base = OTHER; note = 2'-O-methyladenosine-3'-phosphate
agttacttcactctaggaata

SEQ ID NO: 805 - RNA, 21 nt, synthetic construct
  source 1..21: mol_type = other RNA
  modified_base 1: mod_base = OTHER; note = 2'-O-methylguanosine-3'-phosphorothioate
  modified_base 2: mod_base = OTHER; note = 2'-O-methyladenosine-3'-phosphorothioate
  modified_base 3: mod_base = OTHER; note = 2'-O-methylguanosine-3'-phosphate
  modified_base 4: mod_base = OTHER; note = 2'-O-methylguanosine-3'-phosphate
  modified_base 5: mod_base = OTHER; note = 2'-O-methyladenosine-3'-phosphate
  modified_base 6: mod_base = OTHER; note = 2'-O-methylcytidine-3'-phosphate
  modified_base 7: mod_base = OTHER; note = 2'-fluoroadenosine-3'-phosphate
  modified_base 8: mod_base = OTHER; note = 2'-O-methyladenosine-3'-phosphate
  modified_base 9: mod_base = OTHER; note = 2'-fluoroguanosine-3'-phosphate
  modified_base 10: mod_base = OTHER; note = 2'-fluorocytidine-3'-phosphate
  modified_base 11: mod_base = OTHER; note = 2'-fluorocytidine-3'-phosphate
  modified_base 12: mod_base = OTHER; note = 2'-O-methyladenosine-3'-phosphate
  modified_base 13: mod_base = OTHER; note = 2'-O-methylcytidine-3'-phosphate
  modified_base 14: mod_base = OTHER; note = 2'-O-methyladenosine-3'-phosphate
  modified_base 15: mod_base = OTHER; note = 2'-O-methyladenosine-3'-phosphate
  modified_base 16: mod_base = OTHER; note = 2'-O-methylguanosine-3'-phosphate
  modified_base 17: mod_base = OTHER; note = 2'-O-methyladenosine-3'-phosphate
  modified_base 18: mod_base = OTHER; note = 2'-O-methyluridine-3'-phosphate
  modified_base 19: mod_base = OTHER; note = 2'-O-methyluridine-3'-phosphorothioate
  modified_base 20: mod_base = OTHER; note = 2'-O-methyladenosine-3'-phosphorothioate
  modified_base 21: mod_base = OTHER; note = 2'-O-methyladenosine-3'-phosphate
gaggacaagccacaagattaa

SEQ ID NO: 806 - RNA, 21 nt, synthetic construct
  source 1..21: mol_type = other RNA
  modified_base 1: mod_base = OTHER; note = 2'-O-methylcytidine-3'-phosphorothioate
  modified_base 2: mod_base = OTHER; note = 2'-O-methyladenosine-3'-phosphorothioate
  modified_base 3: mod_base = OTHER; note = 2'-O-methylcytidine-3'-phosphate
  modified_base 4: mod_base = OTHER; note = 2'-O-methyladenosine-3'-phosphate
  modified_base 5: mod_base = OTHER; note = 2'-O-methyladenosine-3'-phosphate
  modified_base 6: mod_base = OTHER; note = 2'-O-methylguanosine-3'-phosphate
  modified_base 7: mod_base = OTHER; note = 2'-O-methyladenosine-3'-phosphate
  modified_base 8: mod_base = OTHER; note = 2'-O-methyluridine-3'-phosphate
  modified_base 9: mod_base = OTHER; note = 2'-fluorouridine-3'-phosphate
  modified_base 10: mod_base = OTHER; note = 2'-fluoroadenosine-3'-phosphate
  modified_base 11: mod_base = OTHER; note = 2'-fluorocytidine-3'-phosphate
  modified_base 12: mod_base = OTHER; note = 2'-O-methyladenosine-3'-phosphate
  modified_base 13: mod_base = OTHER; note = 2'-O-methyladenosine-3'-phosphate
  modified_base 14: mod_base = OTHER; note = 2'-O-methylguanosine-3'-phosphate
  modified_base 15: mod_base = OTHER; note = 2'-O-methyladenosine-3'-phosphate
  modified_base 16: mod_base = OTHER; note = 2'-O-methyladenosine-3'-phosphate
  modified_base 17: mod_base = OTHER; note = 2'-O-methyladenosine-3'-phosphate
  modified_base 18: mod_base = OTHER; note = 2'-O-methylcytidine-3'-phosphate
  modified_base 19: mod_base = OTHER; note = 2'-O-methylguanosine-3'-phosphorothioate
  modified_base 20: mod_base = OTHER; note = 2'-O-methylguanosine-3'-phosphorothioate
  modified_base 21: mod_base = OTHER; note = 2'-O-methyladenosine-3'-phosphate
cacaagattacaagaaacgga

SEQ ID NO: 807 - RNA, 21 nt, synthetic construct
  source 1..21: mol_type = other RNA
  modified_base 1: mod_base = OTHER; note = 2'-O-methyladenosine-3'-phosphorothioate
  modified_base 2: mod_base = OTHER; note = 2'-O-methylcytidine-3'-phosphorothioate
  modified_base 3: mod_base = OTHER; note = 2'-O-methyladenosine-3'-phosphate
  modified_base 4: mod_base = OTHER; note = 2'-O-methyladenosine-3'-phosphate
  modified_base 5: mod_base = OTHER; note = 2'-O-methylguanosine-3'-phosphate
  modified_base 6: mod_base = OTHER; note = 2'-O-methyladenosine-3'-phosphate
  modified_base 7: mod_base = OTHER; note = 2'-O-methyluridine-3'-phosphate
  modified_base 8: mod_base = OTHER; note = 2'-O-methyluridine-3'-phosphate
  modified_base 9: mod_base = OTHER; note = 2'-fluoroadenosine-3'-phosphate
  modified_base 10: mod_base = OTHER; note = 2'-fluorocytidine-3'-phosphate
  modified_base 11: mod_base = OTHER; note = 2'-fluoroadenosine-3'-phosphate
  modified_base 12: mod_base = OTHER; note = 2'-O-methyladenosine-3'-phosphate
  modified_base 13: mod_base = OTHER; note = 2'-O-methylguanosine-3'-phosphate
  modified_base 14: mod_base = OTHER; note = 2'-O-methyladenosine-3'-phosphate
  modified_base 15: mod_base = OTHER; note = 2'-O-methyladenosine-3'-phosphate
  modified_base 16: mod_base = OTHER; note = 2'-O-methyladenosine-3'-phosphate
  modified_base 17: mod_base = OTHER; note = 2'-O-methylcytidine-3'-phosphate
  modified_base 18: mod_base = OTHER; note = 2'-O-methylguanosine-3'-phosphate
  modified_base 19: mod_base = OTHER; note = 2'-O-methylguanosine-3'-phosphorothioate
  modified_base 20: mod_base = OTHER; note = 2'-O-methylcytidine-3'-phosphorothioate
  modified_base 21: mod_base = OTHER; note = 2'-O-methyladenosine-3'-phosphate
acaagattacaagaaacggca

SEQ ID NO: 808 - RNA, 21 nt, synthetic construct
  source 1..21: mol_type = other RNA
  modified_base 1: mod_base = OTHER; note = 2'-O-methylcytidine-3'-phosphorothioate
  modified_base 2: mod_base = OTHER; note = 2'-O-methyladenosine-3'-phosphorothioate
  modified_base 3: mod_base = OTHER; note = 2'-O-methyladenosine-3'-phosphate
  modified_base 4: mod_base = OTHER; note = 2'-O-methylguanosine-3'-phosphate
  modified_base 5: mod_base = OTHER; note = 2'-O-methyladenosine-3'-phosphate
  modified_base 6: mod_base = OTHER; note = 2'-O-methyluridine-3'-phosphate
  modified_base 7: mod_base = OTHER; note = 2'-O-methyluridine-3'-phosphate
  modified_base 8: mod_base = OTHER; note = 2'-O-methyladenosine-3'-phosphate
  modified_base 9: mod_base = OTHER; note = 2'-fluorocytidine-3'-phosphate
  modified_base 10: mod_base = OTHER; note = 2'-fluoroadenosine-3'-phosphate
  modified_base 11: mod_base = OTHER; note = 2'-fluoroadenosine-3'-phosphate
  modified_base 12: mod_base = OTHER; note = 2'-O-methylguanosine-3'-phosphate
  modified_base 13: mod_base = OTHER; note = 2'-O-methyladenosine-3'-phosphate
  modified_base 14: mod_base = OTHER; note = 2'-O-methyladenosine-3'-phosphate
  modified_base 15: mod_base = OTHER; note = 2'-O-methyladenosine-3'-phosphate
  modified_base 16: mod_base = OTHER; note = 2'-O-methylcytidine-3'-phosphate
  modified_base 17: mod_base = OTHER; note = 2'-O-methylguanosine-3'-phosphate
  modified_base 18: mod_base = OTHER; note = 2'-O-methylguanosine-3'-phosphate
  modified_base 19: mod_base = OTHER; note = 2'-O-methylcytidine-3'-phosphorothioate
  modified_base 20: mod_base = OTHER; note = 2'-O-methyluridine-3'-phosphorothioate
  modified_base 21: mod_base = OTHER; note = 2'-O-methyladenosine-3'-phosphate
caagattacaagaaacggcta

SEQ ID NO: 809 - RNA, 21 nt, synthetic construct
  source 1..21: mol_type = other RNA
  modified_base 1: mod_base = OTHER; note = 2'-O-methyladenosine-3'-phosphorothioate
  modified_base 2: mod_base = OTHER; note = 2'-O-methyladenosine-3'-phosphorothioate
  modified_base 3: mod_base = OTHER; note = 2'-O-methylguanosine-3'-phosphate
  modified_base 4: mod_base = OTHER; note = 2'-O-methyladenosine-3'-phosphate
  modified_base 5: mod_base = OTHER; note = 2'-O-methyluridine-3'-phosphate
  modified_base 6: mod_base = OTHER; note = 2'-O-methyluridine-3'-phosphate
  modified_base 7: mod_base = OTHER; note = 2'-O-methyladenosine-3'-phosphate
  modified_base 8: mod_base = OTHER; note = 2'-O-methylcytidine-3'-phosphate
  modified_base 9: mod_base = OTHER; note = 2'-fluoroadenosine-3'-phosphate
  modified_base 10: mod_base = OTHER; note = 2'-fluoroadenosine-3'-phosphate
  modified_base 11: mod_base = OTHER; note = 2'-fluoroguanosine-3'-phosphate
  modified_base 12: mod_base = OTHER; note = 2'-O-methyladenosine-3'-phosphate
  modified_base 13: mod_base = OTHER; note = 2'-O-methyladenosine-3'-phosphate
  modified_base 14: mod_base = OTHER; note = 2'-O-methyladenosine-3'-phosphate
  modified_base 15: mod_base = OTHER; note = 2'-O-methylcytidine-3'-phosphate
  modified_base 16: mod_base = OTHER; note = 2'-O-methylguanosine-3'-phosphate
  modified_base 17: mod_base = OTHER; note = 2'-O-methylguanosine-3'-phosphate
  modified_base 18: mod_base = OTHER; note = 2'-O-methylcytidine-3'-phosphate
  modified_base 19: mod_base = OTHER; note = 2'-O-methyluridine-3'-phosphorothioate
  modified_base 20: mod_base = OTHER; note = 2'-O-methyluridine-3'-phosphorothioate
  modified_base 21: mod_base = OTHER; note = 2'-O-methyladenosine-3'-phosphate
aagattacaagaaacggctta

SEQ ID NO: 810 - RNA, 21 nt, synthetic construct
  source 1..21: mol_type = other RNA
  modified_base 1: mod_base = OTHER; note = 2'-O-methyluridine-3'-phosphorothioate
  modified_base 2: mod_base = OTHER; note = 2'-O-methyluridine-3'-phosphorothioate
  modified_base 3: mod_base = OTHER; note = 2'-O-methyladenosine-3'-phosphate
  modified_base 4: mod_base = OTHER; note = 2'-O-methylcytidine-3'-phosphate
  modified_base 5: mod_base = OTHER; note = 2'-O-methyladenosine-3'-phosphate
  modified_base 6: mod_base = OTHER; note = 2'-O-methyladenosine-3'-phosphate
  modified_base 7: mod_base = OTHER; note = 2'-O-methylguanosine-3'-phosphate
  modified_base 8: mod_base = OTHER; note = 2'-O-methyladenosine-3'-phosphate
  modified_base 9: mod_base = OTHER; note = 2'-fluoroadenosine-3'-phosphate
  modified_base 10: mod_base = OTHER; note = 2'-fluoroadenosine-3'-phosphate
  modified_base 11: mod_base = OTHER; note = 2'-fluorocytidine-3'-phosphate
  modified_base 12: mod_base = OTHER; note = 2'-O-methylguanosine-3'-phosphate
  modified_base 13: mod_base = OTHER; note = 2'-O-methylguanosine-3'-phosphate
  modified_base 14: mod_base = OTHER; note = 2'-O-methylcytidine-3'-phosphate
  modified_base 15: mod_base = OTHER; note = 2'-O-methyluridine-3'-phosphate
  modified_base 16: mod_base = OTHER; note = 2'-O-methyluridine-3'-phosphate
  modified_base 17: mod_base = OTHER; note = 2'-O-methyluridine-3'-phosphate
  modified_base 18: mod_base = OTHER; note = 2'-O-methylcytidine-3'-phosphate
  modified_base 19: mod_base = OTHER; note = 2'-O-methyladenosine-3'-phosphorothioate
  modified_base 20: mod_base = OTHER; note = 2'-O-methylguanosine-3'-phosphorothioate
  modified_base 21: mod_base = OTHER; note = 2'-O-methyladenosine-3'-phosphate
ttacaagaaacggctttcaga

SEQ ID NO: 811 - RNA, 21 nt, synthetic construct
  source 1..21: mol_type = other RNA
  modified_base 1: mod_base = OTHER; note = 2'-O-methyluridine-3'-phosphorothioate
  modified_base 2: mod_base = OTHER; note = 2'-O-methyladenosine-3'-phosphorothioate
  modified_base 3: mod_base = OTHER; note = 2'-O-methylcytidine-3'-phosphate
  modified_base 4: mod_base = OTHER; note = 2'-O-methyladenosine-3'-phosphate
  modified_base 5: mod_base = OTHER; note = 2'-O-methyladenosine-3'-phosphate
  modified_base 6: mod_base = OTHER; note = 2'-O-methylguanosine-3'-phosphate
  modified_base 7: mod_base = OTHER; note = 2'-O-methyladenosine-3'-phosphate
  modified_base 8: mod_base = OTHER; note = 2'-O-methyladenosine-3'-phosphate
  modified_base 9: mod_base = OTHER; note = 2'-fluoroadenosine-3'-phosphate
  modified_base 10: mod_base = OTHER; note = 2'-fluorocytidine-3'-phosphate
  modified_base 11: mod_base = OTHER; note = 2'-fluoroguanosine-3'-phosphate
  modified_base 12: mod_base = OTHER; note = 2'-O-methylguanosine-3'-phosphate
  modified_base 13: mod_base = OTHER; note = 2'-O-methylcytidine-3'-phosphate
  modified_base 14: mod_base = OTHER; note = 2'-O-methyluridine-3'-phosphate
  modified_base 15: mod_base = OTHER; note = 2'-O-methyluridine-3'-phosphate
  modified_base 16: mod_base = OTHER; note = 2'-O-methyluridine-3'-phosphate
  modified_base 17: mod_base = OTHER; note = 2'-O-methylcytidine-3'-phosphate
  modified_base 18: mod_base = OTHER; note = 2'-O-methyladenosine-3'-phosphate
  modified_base 19: mod_base = OTHER; note = 2'-O-methylguanosine-3'-phosphorothioate
  modified_base 20: mod_base = OTHER; note = 2'-O-methyluridine-3'-phosphorothioate
  modified_base 21: mod_base = OTHER; note = 2'-O-methyladenosine-3'-phosphate
tacaagaaacggctttcagta

SEQ ID NO: 812 - RNA, 21 nt, synthetic construct
  source 1..21: mol_type = other RNA
  modified_base 1: mod_base = OTHER; note = 2'-O-methyladenosine-3'-phosphorothioate
  modified_base 2: mod_base = OTHER; note = 2'-O-methyladenosine-3'-phosphorothioate
  modified_base 3: mod_base = OTHER; note = 2'-O-methyladenosine-3'-phosphate
  modified_base 4: mod_base = OTHER; note = 2'-O-methylcytidine-3'-phosphate
  modified_base 5: mod_base = OTHER; note = 2'-O-methylguanosine-3'-phosphate
  modified_base 6: mod_base = OTHER; note = 2'-O-methylguanosine-3'-phosphate
  modified_base 7: mod_base = OTHER; note = 2'-fluorocytidine-3'-phosphate
  modified_base 8: mod_base = OTHER; note = 2'-O-methyluridine-3'-phosphate
  modified_base 9: mod_base = OTHER; note = 2'-fluorouridine-3'-phosphate
  modified_base 10: mod_base = OTHER; note = 2'-fluorouridine-3'-phosphate
  modified_base 11: mod_base = OTHER; note = 2'-fluorocytidine-3'-phosphate
  modified_base 12: mod_base = OTHER; note = 2'-O-methyladenosine-3'-phosphate
  modified_base 13: mod_base = OTHER; note = 2'-O-methylguanosine-3'-phosphate
  modified_base 14: mod_base = OTHER; note = 2'-O-methyluridine-3'-phosphate
  modified_base 15: mod_base = OTHER; note = 2'-O-methyluridine-3'-phosphate
  modified_base 16: mod_base = OTHER; note = 2'-O-methylguanosine-3'-phosphate
  modified_base 17: mod_base = OTHER; note = 2'-O-methyladenosine-3'-phosphate
  modified_base 18: mod_base = OTHER; note = 2'-O-methylguanosine-3'-phosphate
  modified_base 19: mod_base = OTHER; note = 2'-O-methylcytidine-3'-phosphorothioate
  modified_base 20: mod_base = OTHER; note = 2'-O-methyluridine-3'-phosphorothioate
  modified_base 21: mod_base = OTHER; note = 2'-O-methyladenosine-3'-phosphate
aaacggctttcagttgagcta

SEQ ID NO: 813 - RNA, 21 nt, synthetic construct
  source 1..21: mol_type = other RNA
  modified_base 1: mod_base = OTHER; note = 2'-O-methylguanosine-3'-phosphorothioate
  modified_base 2: mod_base = OTHER; note = 2'-O-methylcytidine-3'-phosphorothioate
  modified_base 3: mod_base = OTHER; note = 2'-O-methyluridine-3'-phosphate
  modified_base 4: mod_base = OTHER; note = 2'-O-methyluridine-3'-phosphate
  modified_base 5: mod_base = OTHER; note = 2'-O-methyluridine-3'-phosphate
  modified_base 6: mod_base = OTHER; note = 2'-O-methylcytidine-3'-phosphate
  modified_base 7: mod_base = OTHER; note = 2'-fluoroadenosine-3'-phosphate
  modified_base 8: mod_base = OTHER; note = 2'-O-methylguanosine-3'-phosphate
  modified_base 9: mod_base = OTHER; note = 2'-fluorouridine-3'-phosphate
  modified_base 10: mod_base = OTHER; note = 2'-fluorouridine-3'-phosphate
  modified_base 11: mod_base = OTHER; note = 2'-fluoroguanosine-3'-phosphate
  modified_base 12: mod_base = OTHER; note = 2'-O-methyladenosine-3'-phosphate
  modified_base 13: mod_base = OTHER; note = 2'-O-methylguanosine-3'-phosphate
  modified_base 14: mod_base = OTHER; note = 2'-O-methylcytidine-3'-phosphate
  modified_base 15: mod_base = OTHER; note = 2'-O-methyluridine-3'-phosphate
  modified_base 16: mod_base = OTHER; note = 2'-O-methylguanosine-3'-phosphate
  modified_base 17: mod_base = OTHER; note = 2'-O-methyladenosine-3'-phosphate
  modified_base 18: mod_base = OTHER; note = 2'-O-methylcytidine-3'-phosphate
  modified_base 19: mod_base = OTHER; note = 2'-O-methylcytidine-3'-phosphorothioate
  modified_base 20: mod_base = OTHER; note = 2'-O-methyladenosine-3'-phosphorothioate
  modified_base 21: mod_base = OTHER; note = 2'-O-methyladenosine-3'-phosphate
gctttcagttgagctgaccaa

SEQ ID NO: 814 - RNA, 21 nt, synthetic construct
  source 1..21: mol_type = other RNA
  modified_base 1: mod_base = OTHER; note = 2'-O-methylcytidine-3'-phosphorothioate
  modified_base 2: mod_base = OTHER; note = 2'-O-methyluridine-3'-phosphorothioate
  modified_base 3: mod_base = OTHER; note = 2'-O-methyluridine-3'-phosphate
  modified_base 4: mod_base = OTHER; note = 2'-O-methylguanosine-3'-phosphate
  modified_base 5: mod_base = OTHER; note = 2'-O-methylguanosine-3'-phosphate
  modified_base 6: mod_base = OTHER; note = 2'-O-methyladenosine-3'-phosphate
  modified_base 7: mod_base = OTHER; note = 2'-O-methylcytidine-3'-phosphate
  modified_base 8: mod_base = OTHER; note = 2'-O-methyluridine-3'-phosphate
  modified_base 9: mod_base = OTHER; note = 2'-fluorouridine-3'-phosphate
  modified_base 10: mod_base = OTHER; note = 2'-fluoroguanosine-3'-phosphate
  modified_base 11: mod_base = OTHER; note = 2'-fluoroadenosine-3'-phosphate
  modified_base 12: mod_base = OTHER; note = 2'-O-methyluridine-3'-phosphate
  modified_base 13: mod_base = OTHER; note = 2'-O-methyladenosine-3'-phosphate
  modified_base 14: mod_base = OTHER; note = 2'-O-methyluridine-3'-phosphate
  modified_base 15: mod_base = OTHER; note = 2'-O-methyluridine-3'-phosphate
  modified_base 16: mod_base = OTHER; note = 2'-O-methylguanosine-3'-phosphate
  modified_base 17: mod_base = OTHER; note = 2'-O-methylguanosine-3'-phosphate
  modified_base 18: mod_base = OTHER; note = 2'-O-methyluridine-3'-phosphate
  modified_base 19: mod_base = OTHER; note = 2'-O-methylguanosine-3'-phosphorothioate
  modified_base 20: mod_base = OTHER; note = 2'-O-methylcytidine-3'-phosphorothioate
  modified_base 21: mod_base = OTHER; note = 2'-O-methyladenosine-3'-phosphate
cttggacttgatattggtgca

SEQ ID NO: 815 - RNA, 21 nt, synthetic construct
  source 1..21: mol_type = other RNA
  modified_base 1: mod_base = OTHER; note = 2'-O-methyluridine-3'-phosphorothioate
  modified_base 2: mod_base = OTHER; note = 2'-O-methyladenosine-3'-phosphorothioate
  modified_base 3: mod_base = OTHER; note = 2'-O-methyluridine-3'-phosphate
  modified_base 4: mod_base = OTHER; note = 2'-O-methylcytidine-3'-phosphate
  modified_base 5: mod_base = OTHER; note = 2'-O-methylguanosine-3'-phosphate
  modified_base 6: mod_base = OTHER; note = 2'-O-methylcytidine-3'-phosphate
  modified_base 7: mod_base = OTHER; note = 2'-fluorocytidine-3'-phosphate
  modified_base 8: mod_base = OTHER; note = 2'-O-methyladenosine-3'-phosphate
  modified_base 9: mod_base = OTHER; note = 2'-fluoroguanosine-3'-phosphate
  modified_base 10: mod_base = OTHER; note = 2'-fluoroguanosine-3'-phosphate
  modified_base 11: mod_base = OTHER; note = 2'-fluoroadenosine-3'-phosphate
  modified_base 12: mod_base = OTHER; note = 2'-O-methyluridine-3'-phosphate
  modified_base 13: mod_base = OTHER; note = 2'-O-methylguanosine-3'-phosphate
  modified_base 14: mod_base = OTHER; note = 2'-O-methyladenosine-3'-phosphate
  modified_base 15: mod_base = OTHER; note = 2'-O-methyluridine-3'-phosphate
  modified_base 16: mod_base = OTHER; note = 2'-O-methylcytidine-3'-phosphate
  modified_base 17: mod_base = OTHER; note = 2'-O-methylcytidine-3'-phosphate
  modified_base 18: mod_base = OTHER; note = 2'-O-methyluridine-3'-phosphate
  modified_base 19: mod_base = OTHER; note = 2'-O-methyladenosine-3'-phosphorothioate
  modified_base 20: mod_base = OTHER; note = 2'-O-methylguanosine-3'-phosphorothioate
  modified_base 21: mod_base = OTHER; note = 2'-O-methyladenosine-3'-phosphate
tatcgccaggatgatcctaga

SEQ ID NO: 816 - RNA, 21 nt, synthetic construct
  source 1..21: mol_type = other RNA
  modified_base 1: mod_base = OTHER; note = 2'-O-methylcytidine-3'-phosphorothioate
  modified_base 2: mod_base = OTHER; note = 2'-O-methyladenosine-3'-phosphorothioate
  modified_base 3: mod_base = OTHER; note = 2'-O-methylcytidine-3'-phosphate
  modified_base 4: mod_base = OTHER; note = 2'-O-methylcytidine-3'-phosphate
  modified_base 5: mod_base = OTHER; note = 2'-O-methyladenosine-3'-phosphate
  modified_base 6: mod_base = OTHER; note = 2'-O-methylcytidine-3'-phosphate
  modified_base 7: mod_base = OTHER; note = 2'-fluorocytidine-3'-phosphate
  modified_base 8: mod_base = OTHER; note = 2'-O-methylcytidine-3'-phosphate
  modified_base 9: mod_base = OTHER; note = 2'-fluorouridine-3'-phosphate
  modified_base 10: mod_base = OTHER; note = 2'-fluoroguanosine-3'-phosphate
  modified_base 11: mod_base = OTHER; note = 2'-fluoroguanosine-3'-phosphate
  modified_base 12: mod_base = OTHER; note = 2'-O-methyluridine-3'-phosphate
  modified_base 13: mod_base = OTHER; note = 2'-O-methylguanosine-3'-phosphate
  modified_base 14: mod_base = OTHER; note = 2'-O-methylcytidine-3'-phosphate
  modified_base 15: mod_base = OTHER; note = 2'-O-methyluridine-3'-phosphate
  modified_base 16: mod_base = OTHER; note = 2'-O-methylguanosine-3'-phosphate
  modified_base 17: mod_base = OTHER; note = 2'-O-methyladenosine-3'-phosphate
  modified_base 18: mod_base = OTHER; note = 2'-O-methylcytidine-3'-phosphate
  modified_base 19: mod_base = OTHER; note = 2'-O-methyluridine-3'-phosphorothioate
  modified_base 20: mod_base = OTHER; note = 2'-O-methyladenosine-3'-phosphorothioate
  modified_base 21: mod_base = OTHER; note = 2'-O-methyladenosine-3'-phosphate
caccaccctggtgctgactaa

SEQ ID NO: 817 - RNA, 21 nt, synthetic construct
  source 1..21: mol_type = other RNA
  modified_base 1: mod_base = OTHER; note = 2'-O-methyladenosine-3'-phosphorothioate
  modified_base 2: mod_base = OTHER; note = 2'-O-methyluridine-3'-phosphorothioate
  modified_base 3: mod_base = OTHER; note = 2'-O-methylcytidine-3'-phosphate
  modified_base 4: mod_base = OTHER; note = 2'-O-methyladenosine-3'-phosphate
  modified_base 5: mod_base = OTHER; note = 2'-O-methylguanosine-3'-phosphate
  modified_base 6: mod_base = OTHER; note = 2'-O-methylcytidine-3'-phosphate
  modified_base 7: mod_base = OTHER; note = 2'-O-methyluridine-3'-phosphate
  modified_base 8: mod_base = OTHER; note = 2'-O-methylguanosine-3'-phosphate
  modified_base 9: mod_base = OTHER; note = 2'-fluoroguanosine-3'-phosphate
  modified_base 10: mod_base = OTHER; note = 2'-fluorocytidine-3'-phosphate
  modified_base 11: mod_base = OTHER; note = 2'-fluorocytidine-3'-phosphate
  modified_base 12: mod_base = OTHER; note = 2'-O-methyluridine-3'-phosphate
  modified_base 13: mod_base = OTHER; note = 2'-O-methylguanosine-3'-phosphate
  modified_base 14: mod_base = OTHER; note = 2'-O-methylguanosine-3'-phosphate
  modified_base 15: mod_base = OTHER; note = 2'-O-methyluridine-3'-phosphate
  modified_base 16: mod_base = OTHER; note = 2'-O-methyluridine-3'-phosphate
  modified_base 17: mod_base = OTHER; note = 2'-O-methyluridine-3'-phosphate
  modified_base 18: mod_base = OTHER; note = 2'-O-methylguanosine-3'-phosphate
  modified_base 19: mod_base = OTHER; note = 2'-O-methyladenosine-3'-phosphorothioate
  modified_base 20: mod_base = OTHER; note = 2'-O-methyluridine-3'-phosphorothioate
  modified_base 21: mod_base = OTHER; note = 2'-O-methyladenosine-3'-phosphate
atcagctggcctggtttgata

SEQ ID NO: 818 - RNA, 21 nt, synthetic construct
  source 1..21: mol_type = other RNA
  modified_base 1: mod_base = OTHER; note = 2'-O-methyluridine-3'-phosphorothioate
  modified_base 2: mod_base = OTHER; note = 2'-O-methylcytidine-3'-phosphorothioate
  modified_base 3: mod_base = OTHER; note = 2'-O-methyladenosine-3'-phosphate
  modified_base 4: mod_base = OTHER; note = 2'-O-methylguanosine-3'-phosphate
  modified_base 5: mod_base = OTHER; note = 2'-O-methylcytidine-3'-phosphate
  modified_base 6: mod_base = OTHER; note = 2'-O-methyluridine-3'-phosphate
  modified_base 7: mod_base = OTHER; note = 2'-fluoroguanosine-3'-phosphate
  modified_base 8: mod_base = OTHER; note = 2'-O-methylguanosine-3'-phosphate
  modified_base 9: mod_base = OTHER; note = 2'-fluorocytidine-3'-phosphate
  modified_base 10: mod_base = OTHER; note = 2'-fluorocytidine-3'-phosphate
  modified_base 11: mod_base = OTHER; note = 2'-fluorouridine-3'-phosphate
  modified_base 12: mod_base = OTHER; note = 2'-O-methylguanosine-3'-phosphate
  modified_base 13: mod_base = OTHER; note = 2'-O-methylguanosine-3'-phosphate
  modified_base 14: mod_base = OTHER; note = 2'-O-methyluridine-3'-phosphate
  modified_base 15: mod_base = OTHER; note = 2'-O-methyluridine-3'-phosphate
  modified_base 16: mod_base = OTHER; note = 2'-O-methyluridine-3'-phosphate
  modified_base 17: mod_base = OTHER; note = 2'-O-methylguanosine-3'-phosphate
  modified_base 18: mod_base = OTHER; note = 2'-O-methyladenosine-3'-phosphate
  modified_base 19: mod_base = OTHER; note = 2'-O-methyluridine-3'-phosphorothioate
  modified_base 20: mod_base = OTHER; note = 2'-O-methyladenosine-3'-phosphorothioate
  modified_base 21: mod_base = OTHER; note = 2'-O-methyladenosine-3'-phosphate
tcagctggcctggtttgataa

SEQ ID NO: 819 - RNA, 21 nt, synthetic construct
  source 1..21: mol_type = other RNA
  modified_base 1: mod_base = OTHER; note = 2'-O-methyluridine-3'-phosphorothioate
  modified_base 2: mod_base = OTHER; note = 2'-O-methylcytidine-3'-phosphorothioate
  modified_base 3: mod_base = OTHER; note = 2'-O-methyladenosine-3'-phosphate
  modified_base 4: mod_base = OTHER; note = 2'-O-methylguanosine-3'-phosphate
  modified_base 5: mod_base = OTHER; note = 2'-O-methylcytidine-3'-phosphate
  modified_base 6: mod_base = OTHER; note = 2'-O-methyluridine-3'-phosphate
  modified_base 7: mod_base = OTHER; note = 2'-O-methylguanosine-3'-phosphate
  modified_base 8: mod_base = OTHER; note = 2'-O-methylguanosine-3'-phosphate
  modified_base 9: mod_base = OTHER; note = 2'-fluorocytidine-3'-phosphate
  modified_base 10: mod_base = OTHER; note = 2'-fluorocytidine-3'-phosphate
  modified_base 11: mod_base = OTHER; note = 2'-fluorouridine-3'-phosphate
  modified_base 12: mod_base = OTHER; note = 2'-O-methylguanosine-3'-phosphate
  modified_base 13: mod_base = OTHER; note = 2'-O-methylguanosine-3'-phosphate
  modified_base 14: mod_base = OTHER; note = 2'-O-methyluridine-3'-phosphate
  modified_base 15: mod_base = OTHER; note = 2'-O-methyluridine-3'-phosphate
  modified_base 16: mod_base = OTHER; note = 2'-O-methyluridine-3'-phosphate
  modified_base 17: mod_base = OTHER; note = 2'-O-methylguanosine-3'-phosphate
  modified_base 18: mod_base = OTHER; note = 2'-O-methyladenosine-3'-phosphate
  modified_base 19: mod_base = OTHER; note = 2'-O-methyluridine-3'-phosphorothioate
  modified_base 20: mod_base = OTHER; note = 2'-O-methyladenosine-3'-phosphorothioate
  modified_base 21: mod_base = OTHER; note = 2'-O-methyladenosine-3'-phosphate
tcagctggcctggtttgataa

SEQ ID NO: 820 - RNA, 21 nt, synthetic construct
  source 1..21: mol_type = other RNA
  modified_base 1: mod_base = OTHER; note = 2'-O-methylcytidine-3'-phosphorothioate
  modified_base 2: mod_base = OTHER; note = 2'-O-methyluridine-3'-phosphorothioate
  modified_base 3: mod_base = OTHER; note = 2'-O-methylguanosine-3'-phosphate
  modified_base 4: mod_base = OTHER; note = 2'-O-methylguanosine-3'-phosphate
  modified_base 5: mod_base = OTHER; note = 2'-O-methylcytidine-3'-phosphate
  modified_base 6: mod_base = OTHER; note = 2'-O-methylcytidine-3'-phosphate
  modified_base 7: mod_base = OTHER; note = 2'-fluorouridine-3'-phosphate
  modified_base 8: mod_base = OTHER; note = 2'-O-methylguanosine-3'-phosphate
  modified_base 9: mod_base = OTHER; note = 2'-fluoroguanosine-3'-phosphate
  modified_base 10: mod_base = OTHER; note = 2'-fluorouridine-3'-phosphate
  modified_base 11: mod_base = OTHER; note = 2'-fluorouridine-3'-phosphate
  modified_base 12: mod_base = OTHER; note = 2'-O-methyluridine-3'-phosphate
  modified_base 13: mod_base = OTHER; note = 2'-O-methylguanosine-3'-phosphate
  modified_base 14: mod_base = OTHER; note = 2'-O-methyladenosine-3'-phosphate
  modified_base 15: mod_base = OTHER; note = 2'-O-methyluridine-3'-phosphate
  modified_base 16: mod_base = OTHER; note = 2'-O-methyladenosine-3'-phosphate
  modified_base 17: mod_base = OTHER; note = 2'-O-methylcytidine-3'-phosphate
  modified_base 18: mod_base = OTHER; note = 2'-O-methyluridine-3'-phosphate
  modified_base 19: mod_base = OTHER; note = 2'-O-methylguanosine-3'-phosphorothioate
  modified_base 20: mod_base = OTHER; note = 2'-O-methyladenosine-3'-phosphorothioate
  modified_base 21: mod_base = OTHER; note = 2'-O-methyladenosine-3'-phosphate
ctggcctggtttgatactgaa

SEQ ID NO: 821 - RNA, 21 nt, synthetic construct
  source 1..21: mol_type = other RNA
  modified_base 1: mod_base = OTHER; note = 2'-O-methylcytidine-3'-phosphorothioate
  modified_base 2: mod_base = OTHER; note = 2'-O-methyluridine-3'-phosphorothioate
  modified_base 3: mod_base = OTHER; note = 2'-O-methylguanosine-3'-phosphate
  modified_base 4: mod_base = OTHER; note = 2'-O-methyluridine-3'-phosphate
  modified_base 5: mod_base = OTHER; note = 2'-O-methyladenosine-3'-phosphate
  modified_base 6: mod_base = OTHER; note = 2'-O-methyladenosine-3'-phosphate
  modified_base 7: mod_base = OTHER; note = 2'-O-methyladenosine-3'-phosphate
  modified_base 8: mod_base = OTHER; note = 2'-O-methyluridine-3'-phosphate
  modified_base 9: mod_base = OTHER; note = 2'-fluorocytidine-3'-phosphate
  modified_base 10: mod_base = OTHER; note = 2'-fluoroadenosine-3'-phosphate
  modified_base 11: mod_base = OTHER; note = 2'-fluorouridine-3'-phosphate
  modified_base 12: mod_base = OTHER; note = 2'-O-methylcytidine-3'-phosphate
  modified_base 13: mod_base = OTHER; note = 2'-O-methylcytidine-3'-phosphate
  modified_base 14: mod_base = OTHER; note = 2'-O-methyluridine-3'-phosphate
  modified_base 15: mod_base = OTHER; note = 2'-O-methyluridine-3'-phosphate
  modified_base 16: mod_base = OTHER; note = 2'-O-methyluridine-3'-phosphate
  modified_base 17: mod_base = OTHER; note = 2'-O-methyladenosine-3'-phosphate
  modified_base 18: mod_base = OTHER; note = 2'-O-methylguanosine-3'-phosphate
  modified_base 19: mod_base = OTHER; note = 2'-O-methylguanosine-3'-phosphorothioate
  modified_base 20: mod_base = OTHER; note = 2'-O-methyluridine-3'-phosphorothioate
  modified_base 21: mod_base = OTHER; note = 2'-O-methyladenosine-3'-phosphate
ctgtaaatcatcctttaggta

SEQ ID NO: 822 - RNA, 21 nt, synthetic construct
  source 1..21: mol_type = other RNA
  modified_base 1: mod_base = OTHER; note = 2'-O-methyluridine-3'-phosphorothioate
  modified_base 2: mod_base = OTHER; note = 2'-O-methylguanosine-3'-phosphorothioate
  modified_base 3: mod_base = OTHER; note = 2'-O-methyluridine-3'-phosphate
  modified_base 4: mod_base = OTHER; note = 2'-O-methyladenosine-3'-phosphate
  modified_base 5: mod_base = OTHER; note = 2'-O-methyladenosine-3'-phosphate
  modified_base 6: mod_base = OTHER; note = 2'-O-methyladenosine-3'-phosphate
  modified_base 7: mod_base = OTHER; note = 2'-O-methyluridine-3'-phosphate
  modified_base 8: mod_base = OTHER; note = 2'-O-methylcytidine-3'-phosphate
  modified_base 9: mod_base = OTHER; note = 2'-fluoroadenosine-3'-phosphate
  modified_base 10: mod_base = OTHER; note = 2'-fluorouridine-3'-phosphate
  modified_base 11: mod_base = OTHER; note = 2'-fluorocytidine-3'-phosphate
  modified_base 12: mod_base = OTHER; note = 2'-O-methylcytidine-3'-phosphate
  modified_base 13: mod_base = OTHER; note = 2'-O-methyluridine-3'-phosphate
  modified_base 14: mod_base = OTHER; note = 2'-O-methyluridine-3'-phosphate
  modified_base 15: mod_base = OTHER; note = 2'-O-methyluridine-3'-phosphate
  modified_base 16: mod_base = OTHER; note = 2'-O-methyladenosine-3'-phosphate
  modified_base 17: mod_base = OTHER; note = 2'-O-methylguanosine-3'-phosphate
  modified_base 18: mod_base = OTHER; note = 2'-O-methylguanosine-3'-phosphate
  modified_base 19: mod_base = OTHER; note = 2'-O-methyluridine-3'-phosphorothioate
  modified_base 20: mod_base = OTHER; note = 2'-O-methyladenosine-3'-phosphorothioate
  modified_base 21: mod_base = OTHER; note = 2'-O-methyladenosine-3'-phosphate
tgtaaatcatcctttaggtaa

SEQ ID NO: 823 - RNA, 21 nt, synthetic construct
  source 1..21: mol_type = other RNA
  modified_base 1: mod_base = OTHER; note = 2'-O-methyladenosine-3'-phosphorothioate
  modified_base 2: mod_base = OTHER; note = 2'-O-methyladenosine-3'-phosphorothioate
  modified_base 3: mod_base = OTHER; note = 2'-O-methyladenosine-3'-phosphate
  modified_base 4: mod_base = OTHER; note = 2'-O-methylguanosine-3'-phosphate
  modified_base 5: mod_base = OTHER; note = 2'-O-methyladenosine-3'-phosphate
  modified_base 6: mod_base = OTHER; note = 2'-O-methylcytidine-3'-phosphate
  modified_base 7: mod_base = OTHER; note = 2'-O-methyluridine-3'-phosphate
  modified_base 8: mod_base = OTHER; note = 2'-O-methyluridine-3'-phosphate
  modified_base 9: mod_base = OTHER; note = 2'-fluoroguanosine-3'-phosphate
  modified_base 10: mod_base = OTHER; note = 2'-fluoroguanosine-3'-phosphate
  modified_base 11: mod_base = OTHER; note = 2'-fluorouridine-3'-phosphate
  modified_base 12: mod_base = OTHER; note = 2'-O-methyluridine-3'-phosphate
  modified_base 13: mod_base = OTHER; note = 2'-O-methylguanosine-3'-phosphate
  modified_base 14: mod_base = OTHER; note = 2'-O-methylguanosine-3'-phosphate
  modified_base 15: mod_base = OTHER; note = 2'-O-methyluridine-3'-phosphate
  modified_base 16: mod_base = OTHER; note = 2'-O-methyladenosine-3'-phosphate
  modified_base 17: mod_base = OTHER; note = 2'-O-methylguanosine-3'-phosphate
  modified_base 18: mod_base = OTHER; note = 2'-O-methylguanosine-3'-phosphate
  modified_base 19: mod_base = OTHER; note = 2'-O-methylguanosine-3'-phosphorothioate
  modified_base 20: mod_base = OTHER; note = 2'-O-methyluridine-3'-phosphorothioate
  modified_base 21: mod_base = OTHER; note = 2'-O-methyladenosine-3'-phosphate
aaagacttggttggtagggta

SEQ ID NO: 824 - RNA, 21 nt, synthetic construct
  source 1..21: mol_type = other RNA
  modified_base 1: mod_base = OTHER; note = 2'-O-methyladenosine-3'-phosphorothioate
  modified_base 2: mod_base = OTHER; note = 2'-O-methylcytidine-3'-phosphorothioate
  modified_base 3: mod_base = OTHER; note = 2'-O-methyluridine-3'-phosphate
  modified_base 4: mod_base = OTHER; note = 2'-O-methyluridine-3'-phosphate
  modified_base 5: mod_base = OTHER; note = 2'-O-methyluridine-3'-phosphate
  modified_base 6: mod_base = OTHER; note = 2'-O-methylguanosine-3'-phosphate
  modified_base 7: mod_base = OTHER; note = 2'-fluoroadenosine-3'-phosphate
  modified_base 8: mod_base = OTHER; note = 2'-O-methyladenosine-3'-phosphate
  modified_base 9: mod_base = OTHER; note = 2'-fluoroadenosine-3'-phosphate
  modified_base 10: mod_base = OTHER; note = 2'-fluoroguanosine-3'-phosphate
  modified_base 11: mod_base = OTHER; note = 2'-fluoroguanosine-3'-phosphate
  modified_base 12: mod_base = OTHER; note = 2'-O-methyladenosine-3'-phosphate
  modified_base 13: mod_base = OTHER; note = 2'-O-methylguanosine-3'-phosphate
  modified_base 14: mod_base = OTHER; note = 2'-O-methyladenosine-3'-phosphate
  modified_base 15: mod_base = OTHER; note = 2'-O-methyluridine-3'-phosphate
  modified_base 16: mod_base = OTHER; note = 2'-O-methylguanosine-3'-phosphate
  modified_base 17: mod_base = OTHER; note = 2'-O-methyluridine-3'-phosphate
  modified_base 18: mod_base = OTHER; note = 2'-O-methylcytidine-3'-phosphate
  modified_base 19: mod_base = OTHER; note = 2'-O-methyluridine-3'-phosphorothioate
  modified_base 20: mod_base = OTHER; note = 2'-O-methyluridine-3'-phosphorothioate
  modified_base 21: mod_base = OTHER; note = 2'-O-methyladenosine-3'-phosphate
actttgaaaggagatgtctta

SEQ ID NO: 825 - RNA, 21 nt, synthetic construct
  source 1..21: mol_type = other RNA
  modified_base 1: mod_base = OTHER; note = 2'-O-methyladenosine-3'-phosphorothioate
  modified_base 2: mod_base = OTHER; note = 2'-O-methylcytidine-3'-phosphorothioate
  modified_base 3: mod_base = OTHER; note = 2'-O-methyluridine-3'-phosphate
  modified_base 4: mod_base = OTHER; note = 2'-O-methyluridine-3'-phosphate
  modified_base 5: mod_base = OTHER; note = 2'-O-methyluridine-3'-phosphate
  modified_base 6: mod_base = OTHER; note = 2'-O-methylguanosine-3'-phosphate
  modified_base 7: mod_base = OTHER; note = 2'-O-methyladenosine-3'-phosphate
  modified_base 8: mod_base = OTHER; note = 2'-O-methyladenosine-3'-phosphate
  modified_base 9: mod_base = OTHER; note = 2'-fluoroadenosine-3'-phosphate
  modified_base 10: mod_base = OTHER; note = 2'-fluoroguanosine-3'-phosphate
  modified_base 11: mod_base = OTHER; note = 2'-fluoroguanosine-3'-phosphate
  modified_base 12: mod_base = OTHER; note = 2'-O-methyladenosine-3'-phosphate
  modified_base 13: mod_base = OTHER; note = 2'-O-methylguanosine-3'-phosphate
  modified_base 14: mod_base = OTHER; note = 2'-O-methyladenosine-3'-phosphate
  modified_base 15: mod_base = OTHER; note = 2'-O-methyluridine-3'-phosphate
  modified_base 16: mod_base = OTHER; note = 2'-O-methylguanosine-3'-phosphate
  modified_base 17: mod_base = OTHER; note = 2'-O-methyluridine-3'-phosphate
  modified_base 18: mod_base = OTHER; note = 2'-O-methylcytidine-3'-phosphate
  modified_base 19: mod_base = OTHER; note = 2'-O-methyluridine-3'-phosphorothioate
  modified_base 20: mod_base = OTHER; note = 2'-O-methyluridine-3'-phosphorothioate
  modified_base 21: mod_base = OTHER; note = 2'-O-methyladenosine-3'-phosphate
actttgaaaggagatgtctta

SEQ ID NO: 826 - RNA, 21 nt, synthetic construct
  source 1..21: mol_type = other RNA
  modified_base 1: mod_base = OTHER; note = 2'-O-methyluridine-3'-phosphorothioate
  modified_base 2: mod_base = OTHER; note = 2'-O-methyluridine-3'-phosphorothioate
  modified_base 3: mod_base = OTHER; note = 2'-O-methylcytidine-3'-phosphate
  modified_base 4: mod_base = OTHER; note = 2'-O-methyluridine-3'-phosphate
  modified_base 5: mod_base = OTHER; note = 2'-O-methylcytidine-3'-phosphate
  modified_base 6: mod_base = OTHER; note = 2'-O-methyladenosine-3'-phosphate
  modified_base 7: mod_base = OTHER; note = 2'-O-methylguanosine-3'-phosphate
  modified_base 8: mod_base = OTHER; note = 2'-O-methyladenosine-3'-phosphate
  modified_base 9: mod_base = OTHER; note = 2'-fluorouridine-3'-phosphate
  modified_base 10: mod_base = OTHER; note = 2'-fluorouridine-3'-phosphate
  modified_base 11: mod_base = OTHER; note = 2'-fluorouridine-3'-phosphate
  modified_base 12: mod_base = OTHER; note = 2'-O-methylcytidine-3'-phosphate
  modified_base 13: mod_base = OTHER; note = 2'-O-methyluridine-3'-phosphate
  modified_base 14: mod_base = OTHER; note = 2'-O-methylguanosine-3'-phosphate
  modified_base 15: mod_base = OTHER; note = 2'-O-methylguanosine-3'-phosphate
  modified_base 16: mod_base = OTHER; note = 2'-O-methyluridine-3'-phosphate
  modified_base 17: mod_base = OTHER; note = 2'-O-methyluridine-3'-phosphate
  modified_base 18: mod_base = OTHER; note = 2'-O-methylguanosine-3'-phosphate
  modified_base 19: mod_base = OTHER; note = 2'-O-methyluridine-3'-phosphorothioate
  modified_base 20: mod_base = OTHER; note = 2'-O-methyluridine-3'-phosphorothioate
  modified_base 21: mod_base = OTHER; note = 2'-O-methyladenosine-3'-phosphate
ttctcagatttctggttgtta

SEQ ID NO: 827 - RNA, 21 nt, synthetic construct
  source 1..21: mol_type = other RNA
  modified_base 1: mod_base = OTHER; note = 2'-O-methyluridine-3'-phosphorothioate
  modified_base 2: mod_base = OTHER; note = 2'-O-methylcytidine-3'-phosphorothioate
  modified_base 3: mod_base = OTHER; note = 2'-O-methyluridine-3'-phosphate
  modified_base 4: mod_base = OTHER; note = 2'-O-methylcytidine-3'-phosphate
  modified_base 5: mod_base = OTHER; note = 2'-O-methyladenosine-3'-phosphate
  modified_base 6: mod_base = OTHER; note = 2'-O-methylguanosine-3'-phosphate
  modified_base 7: mod_base = OTHER; note = 2'-fluoroadenosine-3'-phosphate
  modified_base 8: mod_base = OTHER; note = 2'-O-methyluridine-3'-phosphate
  modified_base 9: mod_base = OTHER; note = 2'-fluorouridine-3'-phosphate
  modified_base 10: mod_base = OTHER; note = 2'-fluorouridine-3'-phosphate
  modified_base 11: mod_base = OTHER; note = 2'-fluorocytidine-3'-phosphate
  modified_base 12: mod_base = OTHER; note = 2'-O-methyluridine-3'-phosphate
  modified_base 13: mod_base = OTHER; note = 2'-O-methylguanosine-3'-phosphate
  modified_base 14: mod_base = OTHER; note = 2'-O-methylguanosine-3'-phosphate
  modified_base 15: mod_base = OTHER; note = 2'-O-methyluridine-3'-phosphate
  modified_base 16: mod_base = OTHER; note = 2'-O-methyluridine-3'-phosphate
  modified_base 17: mod_base = OTHER; note = 2'-O-methylguanosine-3'-phosphate
  modified_base 18: mod_base = OTHER; note = 2'-O-methyluridine-3'-phosphate
  modified_base 19: mod_base = OTHER; note = 2'-O-methyluridine-3'-phosphorothioate
  modified_base 20: mod_base = OTHER; note = 2'-O-methyladenosine-3'-phosphorothioate
  modified_base 21: mod_base = OTHER; note = 2'-O-methyladenosine-3'-phosphate
tctcagatttctggttgttaa

SEQ ID NO: 828 - RNA, 21 nt, synthetic construct
  source 1..21: mol_type = other RNA
  modified_base 1: mod_base = OTHER; note = 2'-O-methyluridine-3'-phosphorothioate
  modified_base 2: mod_base = OTHER; note = 2'-O-methylcytidine-3'-phosphorothioate
  modified_base 3: mod_base = OTHER; note = 2'-O-methyluridine-3'-phosphate
  modified_base 4: mod_base = OTHER; note = 2'-O-methylcytidine-3'-phosphate
  modified_base 5: mod_base = OTHER; note = 2'-O-methyladenosine-3'-phosphate
  modified_base 6: mod_base = OTHER; note = 2'-O-methylguanosine-3'-phosphate
  modified_base 7: mod_base = OTHER; note = 2'-O-methyladenosine-3'-phosphate
  modified_base 8: mod_base = OTHER; note = 2'-O-methyluridine-3'-phosphate
  modified_base 9: mod_base = OTHER; note = 2'-fluorouridine-3'-phosphate
  modified_base 10: mod_base = OTHER; note = 2'-fluorouridine-3'-phosphate
  modified_base 11: mod_base = OTHER; note = 2'-fluorocytidine-3'-phosphate
  modified_base 12: mod_base = OTHER; note = 2'-O-methyluridine-3'-phosphate
  modified_base 13: mod_base = OTHER; note = 2'-O-methylguanosine-3'-phosphate
  modified_base 14: mod_base = OTHER; note = 2'-O-methylguanosine-3'-phosphate
  modified_base 15: mod_base = OTHER; note = 2'-O-methyluridine-3'-phosphate
  modified_base 16: mod_base = OTHER; note = 2'-O-methyluridine-3'-phosphate
  modified_base 17: mod_base = OTHER; note = 2'-O-methylguanosine-3'-phosphate
  modified_base 18: mod_base = OTHER; note = 2'-O-methyluridine-3'-phosphate
  modified_base 19: mod_base = OTHER; note = 2'-O-methyluridine-3'-phosphorothioate
  modified_base 20: mod_base = OTHER; note = 2'-O-methyladenosine-3'-phosphorothioate
  modified_base 21: mod_base = OTHER; note = 2'-O-methyladenosine-3'-phosphate
tctcagatttctggttgttaa

SEQ ID NO: 829 - RNA, 21 nt, synthetic construct
  source 1..21: mol_type = other RNA
  modified_base 1: mod_base = OTHER; note = 2'-O-methylcytidine-3'-phosphorothioate
  modified_base 2: mod_base = OTHER; note = 2'-O-methyluridine-3'-phosphorothioate
  modified_base 3: mod_base = OTHER; note = 2'-O-methylcytidine-3'-phosphate
  modified_base 4: mod_base = OTHER; note = 2'-O-methyladenosine-3'-phosphate
  modified_base 5: mod_base = OTHER; note = 2'-O-methylguanosine-3'-phosphate
  modified_base 6: mod_base = OTHER; note = 2'-O-methyladenosine-3'-phosphate
  modified_base 7: mod_base = OTHER; note = 2'-O-methyluridine-3'-phosphate
  modified_base 8: mod_base = OTHER; note = 2'-O-methyluridine-3'-phosphate
  modified_base 9: mod_base = OTHER; note = 2'-fluorouridine-3'-phosphate
  modified_base 10: mod_base = OTHER; note = 2'-fluorocytidine-3'-phosphate
  modified_base 11: mod_base = OTHER; note = 2'-fluorouridine-3'-phosphate
  modified_base 12: mod_base = OTHER; note = 2'-O-methylguanosine-3'-phosphate
  modified_base 13: mod_base = OTHER; note = 2'-O-methylguanosine-3'-phosphate
  modified_base 14: mod_base = OTHER; note = 2'-O-methyluridine-3'-phosphate
  modified_base 15: mod_base = OTHER; note = 2'-O-methyluridine-3'-phosphate
  modified_base 16: mod_base = OTHER; note = 2'-O-methylguanosine-3'-phosphate
  modified_base 17: mod_base = OTHER; note = 2'-O-methyluridine-3'-phosphate
  modified_base 18: mod_base = OTHER; note = 2'-O-methyluridine-3'-phosphate
  modified_base 19: mod_base = OTHER; note = 2'-O-methyladenosine-3'-phosphorothioate
  modified_base 20: mod_base = OTHER; note = 2'-O-methyluridine-3'-phosphorothioate
  modified_base 21: mod_base = OTHER; note = 2'-O-methyladenosine-3'-phosphate
ctcagatttctggttgttata

SEQ ID NO: 830 - RNA, 21 nt, synthetic construct
  source 1..21: mol_type = other RNA
  modified_base 1: mod_base = OTHER; note = 2'-O-methylguanosine-3'-phosphorothioate
  modified_base 2: mod_base = OTHER; note = 2'-O-methyluridine-3'-phosphorothioate
  modified_base 3: mod_base = OTHER; note = 2'-O-methyluridine-3'-phosphate
  modified_base 4: mod_base = OTHER; note = 2'-O-methylguanosine-3'-phosphate
  modified_base 5: mod_base = OTHER; note = 2'-O-methyluridine-3'-phosphate
  modified_base 6: mod_base = OTHER; note = 2'-O-methyluridine-3'-phosphate
  modified_base 7: mod_base = OTHER; note = 2'-O-methyladenosine-3'-phosphate
  modified_base 8: mod_base = OTHER; note = 2'-O-methyluridine-3'-phosphate
  modified_base 9: mod_base = OTHER; note = 2'-fluoroguanosine-3'-phosphate
  modified_base 10: mod_base = OTHER; note = 2'-fluorouridine-3'-phosphate
  modified_base 11: mod_base = OTHER; note = 2'-fluoroguanosine-3'-phosphate
  modified_base 12: mod_base = OTHER; note = 2'-O-methyladenosine-3'-phosphate
  modified_base 13: mod_base = OTHER; note = 2'-O-methyluridine-3'-phosphate
  modified_base 14: mod_base = OTHER; note = 2'-O-methylcytidine-3'-phosphate
  modified_base 15: mod_base = OTHER; note = 2'-O-methyladenosine-3'-phosphate
  modified_base 16: mod_base = OTHER; note = 2'-O-methyluridine-3'-phosphate
  modified_base 17: mod_base = OTHER; note = 2'-O-methylguanosine-3'-phosphate
  modified_base 18: mod_base = OTHER; note = 2'-O-methyluridine-3'-phosphate
  modified_base 19: mod_base = OTHER; note = 2'-O-methylguanosine-3'-phosphorothioate
  modified_base 20: mod_base = OTHER; note = 2'-O-methyluridine-3'-phosphorothioate
  modified_base 21: mod_base = OTHER; note = 2'-O-methyladenosine-3'-phosphate
gttgttatgtgatcatgtgta

SEQ ID NO: 831 - RNA, 21 nt, synthetic construct
  source 1..21: mol_type = other RNA
  modified_base 1: mod_base = OTHER; note = 2'-O-methyluridine-3'-phosphorothioate
  modified_base 2: mod_base = OTHER; note = 2'-O-methyluridine-3'-phosphorothioate
  modified_base 3: mod_base = OTHER; note = 2'-O-methylguanosine-3'-phosphate
  modified_base 4: mod_base = OTHER; note = 2'-O-methyluridine-3'-phosphate
  modified_base 5: mod_base = OTHER; note = 2'-O-methyluridine-3'-phosphate
  modified_base 6: mod_base = OTHER; note = 2'-O-methyladenosine-3'-phosphate
  modified_base 7: mod_base = OTHER; note = 2'-O-methyluridine-3'-phosphate
  modified_base 8: mod_base = OTHER; note = 2'-O-methylguanosine-3'-phosphate
  modified_base 9: mod_base = OTHER; note = 2'-fluorouridine-3'-phosphate
  modified_base 10: mod_base = OTHER; note = 2'-fluoroguanosine-3'-phosphate
  modified_base 11: mod_base = OTHER; note = 2'-fluoroadenosine-3'-phosphate
  modified_base 12: mod_base = OTHER; note = 2'-O-methyluridine-3'-phosphate
  modified_base 13: mod_base = OTHER; note = 2'-O-methylcytidine-3'-phosphate
  modified_base 14: mod_base = OTHER; note = 2'-O-methyladenosine-3'-phosphate
  modified_base 15: mod_base = OTHER; note = 2'-O-methyluridine-3'-phosphate
  modified_base 16: mod_base = OTHER; note = 2'-O-methylguanosine-3'-phosphate
  modified_base 17: mod_base = OTHER; note = 2'-O-methyluridine-3'-phosphate
  modified_base 18: mod_base = OTHER; note = 2'-O-methylguanosine-3'-phosphate
  modified_base 19: mod_base = OTHER; note = 2'-O-methyluridine-3'-phosphorothioate
  modified_base 20: mod_base = OTHER; note = 2'-O-methylguanosine-3'-phosphorothioate
  modified_base 21: mod_base = OTHER; note = 2'-O-methyladenosine-3'-phosphate
ttgttatgtgatcatgtgtga

SEQ ID NO: 832 - RNA, 21 nt, synthetic construct
  source 1..21: mol_type = other RNA
  modified_base 1: mod_base = OTHER; note = 2'-O-methylguanosine-3'-phosphorothioate
  modified_base 2: mod_base = OTHER; note = 2'-O-methyluridine-3'-phosphorothioate
  modified_base 3: mod_base = OTHER; note = 2'-O-methylguanosine-3'-phosphate
  modified_base 4: mod_base = OTHER; note = 2'-O-methyladenosine-3'-phosphate
  modified_base 5: mod_base = OTHER; note = 2'-O-methyluridine-3'-phosphate
  modified_base 6: mod_base = OTHER; note = 2'-O-methylcytidine-3'-phosphate
  modified_base 7: mod_base = OTHER; note = 2'-fluoroadenosine-3'-phosphate
  modified_base 8: mod_base = OTHER; note = 2'-O-methyluridine-3'-phosphate
  modified_base 9: mod_base = OTHER; note = 2'-fluoroguanosine-3'-phosphate
  modified_base 10: mod_base = OTHER; note = 2'-fluorouridine-3'-phosphate
  modified_base 11: mod_base = OTHER; note = 2'-fluoroguanosine-3'-phosphate
  modified_base 12: mod_base = OTHER; note = 2'-O-methyluridine-3'-phosphate
  modified_base 13: mod_base = OTHER; note = 2'-O-methylguanosine-3'-phosphate
  modified_base 14: mod_base = OTHER; note = 2'-O-methylguanosine-3'-phosphate
  modified_base 15: mod_base = OTHER; note = 2'-O-methyladenosine-3'-phosphate
  modified_base 16: mod_base = OTHER; note = 2'-O-methyladenosine-3'-phosphate
  modified_base 17: mod_base = OTHER; note = 2'-O-methylguanosine-3'-phosphate
  modified_base 18: mod_base = OTHER; note = 2'-O-methyluridine-3'-phosphate
  modified_base 19: mod_base = OTHER; note = 2'-O-methyluridine-3'-phosphorothioate
  modified_base 20: mod_base = OTHER; note = 2'-O-methyladenosine-3'-phosphorothioate
  modified_base 21: mod_base = OTHER; note = 2'-O-methyladenosine-3'-phosphate
gtgatcatgtgtggaagttaa

SEQ ID NO: 833 - RNA, 21 nt, synthetic construct
  source 1..21: mol_type = other RNA
  modified_base 1: mod_base = OTHER; note = 2'-O-methylguanosine-3'-phosphorothioate
  modified_base 2: mod_base = OTHER; note = 2'-O-methyladenosine-3'-phosphorothioate
  modified_base 3: mod_base = OTHER; note = 2'-O-methyluridine-3'-phosphate
  modified_base 4: mod_base = OTHER; note = 2'-O-methylcytidine-3'-phosphate
  modified_base 5: mod_base = OTHER; note = 2'-O-methyladenosine-3'-phosphate
  modified_base 6: mod_base = OTHER; note = 2'-O-methyluridine-3'-phosphate
  modified_base 7: mod_base = OTHER; note = 2'-O-methylguanosine-3'-phosphate
  modified_base 8: mod_base = OTHER; note = 2'-O-methyluridine-3'-phosphate
  modified_base 9: mod_base = OTHER; note = 2'-fluoroguanosine-3'-phosphate
  modified_base 10: mod_base = OTHER; note = 2'-fluorouridine-3'-phosphate
  modified_base 11: mod_base = OTHER; note = 2'-fluoroguanosine-3'-phosphate
  modified_base 12: mod_base = OTHER; note = 2'-O-methylguanosine-3'-phosphate
  modified_base 13: mod_base = OTHER; note = 2'-O-methyladenosine-3'-phosphate
  modified_base 14: mod_base = OTHER; note = 2'-O-methyladenosine-3'-phosphate
  modified_base 15: mod_base = OTHER; note = 2'-O-methylguanosine-3'-phosphate
  modified_base 16: mod_base = OTHER; note = 2'-O-methyluridine-3'-phosphate
  modified_base 17: mod_base = OTHER; note = 2'-O-methyluridine-3'-phosphate
  modified_base 18: mod_base = OTHER; note = 2'-O-methyladenosine-3'-phosphate
  modified_base 19: mod_base = OTHER; note = 2'-O-methyluridine-3'-phosphorothioate
  modified_base 20: mod_base = OTHER; note = 2'-O-methyluridine-3'-phosphorothioate
  modified_base 21: mod_base = OTHER; note = 2'-O-methyladenosine-3'-phosphate
gatcatgtgtggaagttatta

SEQ ID NO: 834 - RNA, 21 nt, synthetic construct
  source 1..21: mol_type = other RNA
  modified_base 1: mod_base = OTHER; note = 2'-O-methyladenosine-3'-phosphorothioate
  modified_base 2: mod_base = OTHER; note = 2'-O-methyluridine-3'-phosphorothioate
  modified_base 3: mod_base = OTHER; note = 2'-O-methylcytidine-3'-phosphate
  modified_base 4: mod_base = OTHER; note = 2'-O-methyladenosine-3'-phosphate
  modified_base 5: mod_base = OTHER; note = 2'-O-methyluridine-3'-phosphate
  modified_base 6: mod_base = OTHER; note = 2'-O-methylguanosine-3'-phosphate
  modified_base 7: mod_base = OTHER; note = 2'-O-methyluridine-3'-phosphate
  modified_base 8: mod_base = OTHER; note = 2'-O-methylguanosine-3'-phosphate
  modified_base 9: mod_base = OTHER; note = 2'-fluorouridine-3'-phosphate
  modified_base 10: mod_base = OTHER; note = 2'-fluoroguanosine-3'-phosphate
  modified_base 11: mod_base = OTHER; note = 2'-fluoroguanosine-3'-phosphate
  modified_base 12: mod_base = OTHER; note = 2'-O-methyladenosine-3'-phosphate
  modified_base 13: mod_base = OTHER; note = 2'-O-methyladenosine-3'-phosphate
  modified_base 14: mod_base = OTHER; note = 2'-O-methylguanosine-3'-phosphate
  modified_base 15: mod_base = OTHER; note = 2'-O-methyluridine-3'-phosphate
  modified_base 16: mod_base = OTHER; note = 2'-O-methyluridine-3'-phosphate
  modified_base 17: mod_base = OTHER; note = 2'-O-methyladenosine-3'-phosphate
  modified_base 18: mod_base = OTHER; note = 2'-O-methyluridine-3'-phosphate
  modified_base 19: mod_base = OTHER; note = 2'-O-methyluridine-3'-phosphorothioate
  modified_base 20: mod_base = OTHER; note = 2'-O-methyladenosine-3'-phosphorothioate
  modified_base 21: mod_base = OTHER; note = 2'-O-methyladenosine-3'-phosphate
atcatgtgtggaagttattaa

SEQ ID NO: 835 - RNA, 21 nt, synthetic construct
  source 1..21: mol_type = other RNA
  modified_base 1: mod_base = OTHER; note = 2'-O-methyluridine-3'-phosphorothioate
  modified_base 2: mod_base = OTHER; note = 2'-O-methylguanosine-3'-phosphorothioate
  modified_base 3: mod_base = OTHER; note = 2'-O-methylcytidine-3'-phosphate
  modified_base 4: mod_base = OTHER; note = 2'-O-methyladenosine-3'-phosphate
  modified_base 5: mod_base = OTHER; note = 2'-O-methyladenosine-3'-phosphate
  modified_base 6: mod_base = OTHER; note = 2'-O-methylcytidine-3'-phosphate
  modified_base 7: mod_base = OTHER; note = 2'-O-methyluridine-3'-phosphate
  modified_base 8: mod_base = OTHER; note = 2'-O-methyluridine-3'-phosphate
  modified_base 9: mod_base = OTHER; note = 2'-fluoroadenosine-3'-phosphate
  modified_base 10: mod_base = OTHER; note = 2'-fluoroadenosine-3'-phosphate
  modified_base 11: mod_base = OTHER; note = 2'-fluorouridine-3'-phosphate
  modified_base 12: mod_base = OTHER; note = 2'-O-methyladenosine-3'-phosphate
  modified_base 13: mod_base = OTHER; note = 2'-O-methylcytidine-3'-phosphate
  modified_base 14: mod_base = OTHER; note = 2'-O-methyluridine-3'-phosphate
  modified_base 15: mod_base = OTHER; note = 2'-O-methylcytidine-3'-phosphate
  modified_base 16: mod_base = OTHER; note = 2'-O-methyladenosine-3'-phosphate
  modified_base 17: mod_base = OTHER; note = 2'-O-methyladenosine-3'-phosphate
  modified_base 18: mod_base = OTHER; note = 2'-O-methyladenosine-3'-phosphate
  modified_base 19: mod_base = OTHER; note = 2'-O-methyluridine-3'-phosphorothioate
  modified_base 20: mod_base = OTHER; note = 2'-O-methylguanosine-3'-phosphorothioate
  modified_base 21: mod_base = OTHER; note = 2'-O-methyladenosine-3'-phosphate
tgcaacttaatactcaaatga

SEQ ID NO: 836 - RNA, 21 nt, synthetic construct
  source 1..21: mol_type = other RNA
  modified_base 1: mod_base = OTHER; note = 2'-O-methylcytidine-3'-phosphorothioate
  modified_base 2: mod_base = OTHER; note = 2'-O-methylcytidine-3'-phosphorothioate
  modified_base 3: mod_base = OTHER; note = 2'-O-methyluridine-3'-phosphate
  modified_base 4: mod_base = OTHER; note = 2'-O-methyluridine-3'-phosphate
  modified_base 5: mod_base = OTHER; note = 2'-O-methyluridine-3'-phosphate
  modified_base 6: mod_base = OTHER; note = 2'-O-methylcytidine-3'-phosphate
  modified_base 7: mod_base = OTHER; note = 2'-fluorouridine-3'-phosphate
  modified_base 8: mod_base = OTHER; note = 2'-O-methylcytidine-3'-phosphate
  modified_base 9: mod_base = OTHER; note = 2'-fluorouridine-3'-phosphate
  modified_base 10: mod_base = OTHER; note = 2'-fluorocytidine-3'-phosphate
  modified_base 11: mod_base = OTHER; note = 2'-fluorouridine-3'-phosphate
  modified_base 12: mod_base = OTHER; note = 2'-O-methyluridine-3'-phosphate
  modified_base 13: mod_base = OTHER; note = 2'-O-methyluridine-3'-phosphate
  modified_base 14: mod_base = OTHER; note = 2'-O-methyladenosine-3'-phosphate
  modified_base 15: mod_base = OTHER; note = 2'-O-methyluridine-3'-phosphate
  modified_base 16: mod_base = OTHER; note = 2'-O-methyladenosine-3'-phosphate
  modified_base 17: mod_base = OTHER; note = 2'-O-methylcytidine-3'-phosphate
  modified_base 18: mod_base = OTHER; note = 2'-O-methyladenosine-3'-phosphate
  modified_base 19: mod_base = OTHER; note = 2'-O-methylguanosine-3'-phosphorothioate
  modified_base 20: mod_base = OTHER; note = 2'-O-methylcytidine-3'-phosphorothioate
  modified_base 21: mod_base = OTHER; note = 2'-O-methyladenosine-3'-phosphate
cctttctctctttatacagca

SEQ ID NO: 837 - RNA, 21 nt, synthetic construct
  source 1..21: mol_type = other RNA
  modified_base 1: mod_base = OTHER; note = 2'-O-methyluridine-3'-phosphorothioate
  modified_base 2: mod_base = OTHER; note = 2'-O-methyluridine-3'-phosphorothioate
  modified_base 3: mod_base = OTHER; note = 2'-O-methyluridine-3'-phosphate
  modified_base 4: mod_base = OTHER; note = 2'-O-methyladenosine-3'-phosphate
  modified_base 5: mod_base = OTHER; note = 2'-O-methyluridine-3'-phosphate
  modified_base 6: mod_base = OTHER; note = 2'-O-methyladenosine-3'-phosphate
  modified_base 7: mod_base = OTHER; note = 2'-fluorocytidine-3'-phosphate
  modified_base 8: mod_base = OTHER; note = 2'-O-methyladenosine-3'-phosphate
  modified_base 9: mod_base = OTHER; note = 2'-fluoroguanosine-3'-phosphate
  modified_base 10: mod_base = OTHER; note = 2'-fluorocytidine-3'-phosphate
  modified_base 11: mod_base = OTHER; note = 2'-fluorouridine-3'-phosphate
  modified_base 12: mod_base = OTHER; note = 2'-O-methylguanosine-3'-phosphate
  modified_base 13: mod_base = OTHER; note = 2'-O-methyluridine-3'-phosphate
  modified_base 14: mod_base = OTHER; note = 2'-O-methyladenosine-3'-phosphate
  modified_base 15: mod_base = OTHER; note = 2'-O-methyluridine-3'-phosphate
  modified_base 16: mod_base = OTHER; note = 2'-O-methyluridine-3'-phosphate
  modified_base 17: mod_base = OTHER; note = 2'-O-methylguanosine-3'-phosphate
  modified_base 18: mod_base = OTHER; note = 2'-O-methyluridine-3'-phosphate
  modified_base 19: mod_base = OTHER; note = 2'-O-methylcytidine-3'-phosphorothioate
  modified_base 20: mod_base = OTHER; note = 2'-O-methyluridine-3'-phosphorothioate
  modified_base 21: mod_base = OTHER; note = 2'-O-methyladenosine-3'-phosphate
tttatacagctgtattgtcta

SEQ ID NO: 838 - RNA, 21 nt, synthetic construct
  source 1..21: mol_type = other RNA
  modified_base 1: mod_base = OTHER; note = 2'-O-methyluridine-3'-phosphorothioate
  modified_base 2: mod_base = OTHER; note = 2'-O-methyluridine-3'-phosphorothioate
  modified_base 3: mod_base = OTHER; note = 2'-O-methyluridine-3'-phosphate
  modified_base 4: mod_base = OTHER; note = 2'-O-methyladenosine-3'-phosphate
  modified_base 5: mod_base = OTHER; note = 2'-O-methyluridine-3'-phosphate
  modified_base 6: mod_base = OTHER; note = 2'-O-methyladenosine-3'-phosphate
  modified_base 7: mod_base = OTHER; note = 2'-O-methylcytidine-3'-phosphate
  modified_base 8: mod_base = OTHER; note = 2'-O-methyladenosine-3'-phosphate
  modified_base 9: mod_base = OTHER; note = 2'-fluoroguanosine-3'-phosphate
  modified_base 10: mod_base = OTHER; note = 2'-fluorocytidine-3'-phosphate
  modified_base 11: mod_base = OTHER; note = 2'-fluorouridine-3'-phosphate
  modified_base 12: mod_base = OTHER; note = 2'-O-methylguanosine-3'-phosphate
  modified_base 13: mod_base = OTHER; note = 2'-O-methyluridine-3'-phosphate
  modified_base 14: mod_base = OTHER; note = 2'-O-methyladenosine-3'-phosphate
  modified_base 15: mod_base = OTHER; note = 2'-O-methyluridine-3'-phosphate
  modified_base 16: mod_base = OTHER; note = 2'-O-methyluridine-3'-phosphate
  modified_base 17: mod_base = OTHER; note = 2'-O-methylguanosine-3'-phosphate
  modified_base 18: mod_base = OTHER; note = 2'-O-methyluridine-3'-phosphate
  modified_base 19: mod_base = OTHER; note = 2'-O-methylcytidine-3'-phosphorothioate
  modified_base 20: mod_base = OTHER; note = 2'-O-methyluridine-3'-phosphorothioate
  modified_base 21: mod_base = OTHER; note = 2'-O-methyladenosine-3'-phosphate
tttatacagctgtattgtcta

SEQ ID NO: 839 - RNA, 21 nt, synthetic construct
  source 1..21: mol_type = other RNA
  modified_base 1: mod_base = OTHER; note = 2'-O-methyladenosine-3'-phosphorothioate
  modified_base 2: mod_base = OTHER; note = 2'-O-methyluridine-3'-phosphorothioate
  modified_base 3: mod_base = OTHER; note = 2'-O-methyluridine-3'-phosphate
  modified_base 4: mod_base = OTHER; note = 2'-O-methylguanosine-3'-phosphate
  modified_base 5: mod_base = OTHER; note = 2'-O-methyluridine-3'-phosphate
  modified_base 6: mod_base = OTHER; note = 2'-O-methylcytidine-3'-phosphate
  modified_base 7: mod_base = OTHER; note = 2'-O-methyluridine-3'-phosphate
  modified_base 8: mod_base = OTHER; note = 2'-O-methylguanosine-3'-phosphate
  modified_base 9: mod_base = OTHER; note = 2'-fluoroadenosine-3'-phosphate
  modified_base 10: mod_base = OTHER; note = 2'-fluoroadenosine-3'-phosphate
  modified_base 11: mod_base = OTHER; note = 2'-fluorocytidine-3'-phosphate
  modified_base 12: mod_base = OTHER; note = 2'-O-methyluridine-3'-phosphate
  modified_base 13: mod_base = OTHER; note = 2'-O-methyluridine-3'-phosphate
  modified_base 14: mod_base = OTHER; note = 2'-O-methylguanosine-3'-phosphate
  modified_base 15: mod_base = OTHER; note = 2'-O-methylcytidine-3'-phosphate
  modified_base 16: mod_base = OTHER; note = 2'-O-methyladenosine-3'-phosphate
  modified_base 17: mod_base = OTHER; note = 2'-O-methyluridine-3'-phosphate
  modified_base 18: mod_base = OTHER; note = 2'-O-methyluridine-3'-phosphate
  modified_base 19: mod_base = OTHER; note = 2'-O-methylguanosine-3'-phosphorothioate
  modified_base 20: mod_base = OTHER; note = 2'-O-methyluridine-3'-phosphorothioate
  modified_base 21: mod_base = OTHER; note = 2'-O-methyladenosine-3'-phosphate
attgtctgaacttgcattgta

SEQ ID NO: 840 - RNA, 21 nt, synthetic construct
  source 1..21: mol_type = other RNA
  modified_base 1: mod_base = OTHER; note = 2'-O-methyluridine-3'-phosphorothioate
  modified_base 2: mod_base = OTHER; note = 2'-O-methyluridine-3'-phosphorothioate
  modified_base 3: mod_base = OTHER; note = 2'-O-methylguanosine-3'-phosphate
  modified_base 4: mod_base = OTHER; note = 2'-O-methylguanosine-3'-phosphate
  modified_base 5: mod_base = OTHER; note = 2'-O-methylcytidine-3'-phosphate
  modified_base 6: mod_base = OTHER; note = 2'-O-methylcytidine-3'-phosphate
  modified_base 7: mod_base = OTHER; note = 2'-fluorouridine-3'-phosphate
  modified_base 8: mod_base = OTHER; note = 2'-O-methylguanosine-3'-phosphate
  modified_base 9: mod_base = OTHER; note = 2'-fluorouridine-3'-phosphate
  modified_base 10: mod_base = OTHER; note = 2'-fluoroadenosine-3'-phosphate
  modified_base 11: mod_base = OTHER; note = 2'-fluoroguanosine-3'-phosphate
  modified_base 12: mod_base = OTHER; note = 2'-O-methyladenosine-3'-phosphate
  modified_base 13: mod_base = OTHER; note = 2'-O-methylguanosine-3'-phosphate
  modified_base 14: mod_base = OTHER; note = 2'-O-methyluridine-3'-phosphate
  modified_base 15: mod_base = OTHER; note = 2'-O-methyluridine-3'-phosphate
  modified_base 16: mod_base = OTHER; note = 2'-O-methylguanosine-3'-phosphate
  modified_base 17: mod_base = OTHER; note = 2'-O-methylcytidine-3'-phosphate
  modified_base 18: mod_base = OTHER; note = 2'-O-methyluridine-3'-phosphate
  modified_base 19: mod_base = OTHER; note = 2'-O-methylguanosine-3'-phosphorothioate
  modified_base 20: mod_base = OTHER; note = 2'-O-methyladenosine-3'-phosphorothioate
  modified_base 21: mod_base = OTHER; note = 2'-O-methyladenosine-3'-phosphate
ttggcctgtagagttgctgaa

SEQ ID NO: 841 - RNA, 21 nt, synthetic construct
  source 1..21: mol_type = other RNA
  modified_base 1: mod_base = OTHER; note = 2'-O-methyladenosine-3'-phosphorothioate
  modified_base 2: mod_base = OTHER; note = 2'-O-methylguanosine-3'-phosphorothioate
  modified_base 3: mod_base = OTHER; note = 2'-O-methyluridine-3'-phosphate
  modified_base 4: mod_base = OTHER; note = 2'-O-methylguanosine-3'-phosphate
  modified_base 5: mod_base = OTHER; note = 2'-O-methylcytidine-3'-phosphate
  modified_base 6: mod_base = OTHER; note = 2'-O-methylcytidine-3'-phosphate
  modified_base 7: mod_base = OTHER; note = 2'-fluorouridine-3'-phosphate
  modified_base 8: mod_base = OTHER; note = 2'-O-methylguanosine-3'-phosphate
  modified_base 9: mod_base = OTHER; note = 2'-fluoroadenosine-3'-phosphate
  modified_base 10: mod_base = OTHER; note = 2'-fluorocytidine-3'-phosphate
  modified_base 11: mod_base = OTHER; note = 2'-fluoroadenosine-3'-phosphate
  modified_base 12: mod_base = OTHER; note = 2'-O-methylcytidine-3'-phosphate
  modified_base 13: mod_base = OTHER; note = 2'-O-methyladenosine-3'-phosphate
  modified_base 14: mod_base = OTHER; note = 2'-O-methylcytidine-3'-phosphate
  modified_base 15: mod_base = OTHER; note = 2'-O-methyluridine-3'-phosphate
  modified_base 16: mod_base = OTHER; note = 2'-O-methyladenosine-3'-phosphate
  modified_base 17: mod_base = OTHER; note = 2'-O-methyladenosine-3'-phosphate
  modified_base 18: mod_base = OTHER; note = 2'-O-methylcytidine-3'-phosphate
  modified_base 19: mod_base = OTHER; note = 2'-O-methylcytidine-3'-phosphorothioate
  modified_base 20: mod_base = OTHER; note = 2'-O-methyladenosine-3'-phosphorothioate
  modified_base 21: mod_base = OTHER; note = 2'-O-methyladenosine-3'-phosphate
agtgcctgacacactaaccaa

SEQ ID NO: 842 - RNA, 21 nt, synthetic construct
  source 1..21: mol_type = other RNA
  modified_base 1: mod_base = OTHER; note = 2'-O-methylcytidine-3'-phosphorothioate
  modified_base 2: mod_base = OTHER; note = 2'-O-methyluridine-3'-phosphorothioate
  modified_base 3: mod_base = OTHER; note = 2'-O-methylguanosine-3'-phosphate
  modified_base 4: mod_base = OTHER; note = 2'-O-methyladenosine-3'-phosphate
  modified_base 5: mod_base = OTHER; note = 2'-O-methylcytidine-3'-phosphate
  modified_base 6: mod_base = OTHER; note = 2'-O-methyladenosine-3'-phosphate
  modified_base 7: mod_base = OTHER; note = 2'-O-methylcytidine-3'-phosphate
  modified_base 8: mod_base = OTHER; note = 2'-O-methyladenosine-3'-phosphate
  modified_base 9: mod_base = OTHER; note = 2'-fluorocytidine-3'-phosphate
  modified_base 10: mod_base = OTHER; note = 2'-fluorouridine-3'-phosphate
  modified_base 11: mod_base = OTHER; note = 2'-fluoroadenosine-3'-phosphate
  modified_base 12: mod_base = OTHER; note = 2'-O-methyladenosine-3'-phosphate
  modified_base 13: mod_base = OTHER; note = 2'-O-methylcytidine-3'-phosphate
  modified_base 14: mod_base = OTHER; note = 2'-O-methylcytidine-3'-phosphate
  modified_base 15: mod_base = OTHER; note = 2'-O-methyladenosine-3'-phosphate
  modified_base 16: mod_base = OTHER; note = 2'-O-methyladenosine-3'-phosphate
  modified_base 17: mod_base = OTHER; note = 2'-O-methylguanosine-3'-phosphate
  modified_base 18: mod_base = OTHER; note = 2'-O-methylcytidine-3'-phosphate
  modified_base 19: mod_base = OTHER; note = 2'-O-methyluridine-3'-phosphorothioate
  modified_base 20: mod_base = OTHER; note = 2'-O-methylguanosine-3'-phosphorothioate
  modified_base 21: mod_base = OTHER; note = 2'-O-methyladenosine-3'-phosphate
ctgacacactaaccaagctga

SEQ ID NO: 843 - RNA, 21 nt, synthetic construct
  source 1..21: mol_type = other RNA
  modified_base 1: mod_base = OTHER; note = 2'-O-methyluridine-3'-phosphorothioate
  modified_base 2: mod_base = OTHER; note = 2'-O-methyladenosine-3'-phosphorothioate
  modified_base 3: mod_base = OTHER; note = 2'-O-methyladenosine-3'-phosphate
  modified_base 4: mod_base = OTHER; note = 2'-O-methylcytidine-3'-phosphate
  modified_base 5: mod_base = OTHER; note = 2'-O-methylcytidine-3'-phosphate
  modified_base 6: mod_base = OTHER; note = 2'-O-methyladenosine-3'-phosphate
  modified_base 7: mod_base = OTHER; note = 2'-O-methyladenosine-3'-phosphate
  modified_base 8: mod_base = OTHER; note = 2'-O-methylguanosine-3'-phosphate
  modified_base 9: mod_base = OTHER; note = 2'-fluorocytidine-3'-phosphate
  modified_base 10: mod_base = OTHER; note = 2'-fluorouridine-3'-phosphate
  modified_base 11: mod_base = OTHER; note = 2'-fluoroguanosine-3'-phosphate
  modified_base 12: mod_base = OTHER; note = 2'-O-methyladenosine-3'-phosphate
  modified_base 13: mod_base = OTHER; note = 2'-O-methylguanosine-3'-phosphate
  modified_base 14: mod_base = OTHER; note = 2'-O-methyluridine-3'-phosphate
  modified_base 15: mod_base = OTHER; note = 2'-O-methyluridine-3'-phosphate
  modified_base 16: mod_base = OTHER; note = 2'-O-methyluridine-3'-phosphate
  modified_base 17: mod_base = OTHER; note = 2'-O-methylcytidine-3'-phosphate
  modified_base 18: mod_base = OTHER; note = 2'-O-methylcytidine-3'-phosphate
  modified_base 19: mod_base = OTHER; note = 2'-O-methyluridine-3'-phosphorothioate
  modified_base 20: mod_base = OTHER; note = 2'-O-methyladenosine-3'-phosphorothioate
  modified_base 21: mod_base = OTHER; note = 2'-O-methyladenosine-3'-phosphate
taaccaagctgagtttcctaa

SEQ ID NO: 844 - RNA, 21 nt, synthetic construct
  source 1..21: mol_type = other RNA
  modified_base 1: mod_base = OTHER; note = 2'-O-methyladenosine-3'-phosphorothioate
  modified_base 2: mod_base = OTHER; note = 2'-O-methylguanosine-3'-phosphorothioate
  modified_base 3: mod_base = OTHER; note = 2'-O-methylcytidine-3'-phosphate
  modified_base 4: mod_base = OTHER; note = 2'-O-methyluridine-3'-phosphate
  modified_base 5: mod_base = OTHER; note = 2'-O-methylguanosine-3'-phosphate
  modified_base 6: mod_base = OTHER; note = 2'-O-methyladenosine-3'-phosphate
  modified_base 7: mod_base = OTHER; note = 2'-fluoroguanosine-3'-phosphate
  modified_base 8: mod_base = OTHER; note = 2'-O-methyluridine-3'-phosphate
  modified_base 9: mod_base = OTHER; note = 2'-fluorouridine-3'-phosphate
  modified_base 10: mod_base = OTHER; note = 2'-fluorouridine-3'-phosphate
  modified_base 11: mod_base = OTHER; note = 2'-fluorocytidine-3'-phosphate
  modified_base 12: mod_base = OTHER; note = 2'-O-methylcytidine-3'-phosphate
  modified_base 13: mod_base = OTHER; note = 2'-O-methyluridine-3'-phosphate
  modified_base 14: mod_base = OTHER; note = 2'-O-methyladenosine-3'-phosphate
  modified_base 15: mod_base = OTHER; note = 2'-O-methyluridine-3'-phosphate
  modified_base 16: mod_base = OTHER; note = 2'-O-methylguanosine-3'-phosphate
  modified_base 17: mod_base = OTHER; note = 2'-O-methylguanosine-3'-phosphate
  modified_base 18: mod_base = OTHER; note = 2'-O-methylguanosine-3'-phosphate
  modified_base 19: mod_base = OTHER; note = 2'-O-methyladenosine-3'-phosphorothioate
  modified_base 20: mod_base = OTHER; note = 2'-O-methyladenosine-3'-phosphorothioate
  modified_base 21: mod_base = OTHER; note = 2'-O-methyladenosine-3'-phosphate
agctgagtttcctatgggaaa

SEQ ID NO: 845 - RNA, 21 nt, synthetic construct
  source 1..21: mol_type = other RNA
  modified_base 1: mod_base = OTHER; note = 2'-O-methyluridine-3'-phosphorothioate
  modified_base 2: mod_base = OTHER; note = 2'-O-methyluridine-3'-phosphorothioate
  modified_base 3: mod_base = OTHER; note = 2'-O-methyluridine-3'-phosphate
  modified_base 4: mod_base = OTHER; note = 2'-O-methylcytidine-3'-phosphate
  modified_base 5: mod_base = OTHER; note = 2'-O-methylcytidine-3'-phosphate
  modified_base 6: mod_base = OTHER; note = 2'-O-methyluridine-3'-phosphate
  modified_base 7: mod_base = OTHER; note = 2'-O-methyladenosine-3'-phosphate
  modified_base 8: mod_base = OTHER; note = 2'-O-methyluridine-3'-phosphate
  modified_base 9: mod_base = OTHER; note = 2'-fluoroguanosine-3'-phosphate
  modified_base 10: mod_base = OTHER; note = 2'-fluoroguanosine-3'-phosphate
  modified_base 11: mod_base = OTHER; note = 2'-fluoroguanosine-3'-phosphate
  modified_base 12: mod_base = OTHER; note = 2'-O-methyladenosine-3'-phosphate
  modified_base 13: mod_base = OTHER; note = 2'-O-methyladenosine-3'-phosphate
  modified_base 14: mod_base = OTHER; note = 2'-O-methylcytidine-3'-phosphate
  modified_base 15: mod_base = OTHER; note = 2'-O-methyladenosine-3'-phosphate
  modified_base 16: mod_base = OTHER; note = 2'-O-methyladenosine-3'-phosphate
  modified_base 17: mod_base = OTHER; note = 2'-O-methyluridine-3'-phosphate
  modified_base 18: mod_base = OTHER; note = 2'-O-methyluridine-3'-phosphate
  modified_base 19: mod_base = OTHER; note = 2'-O-methylguanosine-3'-phosphorothioate
  modified_base 20: mod_base = OTHER; note = 2'-O-methyladenosine-3'-phosphorothioate
  modified_base 21: mod_base = OTHER; note = 2'-O-methyladenosine-3'-phosphate
tttcctatgggaacaattgaa

SEQ ID NO: 846 - RNA, 21 nt, synthetic construct
  source 1..21: mol_type = other RNA
  modified_base 1: mod_base = OTHER; note = 2'-O-methylguanosine-3'-phosphorothioate
  modified_base 2: mod_base = OTHER; note = 2'-O-methyluridine-3'-phosphorothioate
  modified_base 3: mod_base = OTHER; note = 2'-O-methylcytidine-3'-phosphate
  modified_base 4: mod_base = OTHER; note = 2'-O-methylguanosine-3'-phosphate
  modified_base 5: mod_base = OTHER; note = 2'-O-methyladenosine-3'-phosphate
  modified_base 6: mod_base = OTHER; note = 2'-O-methylguanosine-3'-phosphate
  modified_base 7: mod_base = OTHER; note = 2'-fluoroguanosine-3'-phosphate
  modified_base 8: mod_base = OTHER; note = 2'-O-methyladenosine-3'-phosphate
  modified_base 9: mod_base = OTHER; note = 2'-fluoroguanosine-3'-phosphate
  modified_base 10: mod_base = OTHER; note = 2'-fluorouridine-3'-phosphate
  modified_base 11: mod_base = OTHER; note = 2'-fluoroadenosine-3'-phosphate
  modified_base 12: mod_base = OTHER; note = 2'-O-methyladenosine-3'-phosphate
  modified_base 13: mod_base = OTHER; note = 2'-O-methylcytidine-3'-phosphate
  modified_base 14: mod_base = OTHER; note = 2'-O-methyladenosine-3'-phosphate
  modified_base 15: mod_base = OTHER; note = 2'-O-methyladenosine-3'-phosphate
  modified_base 16: mod_base = OTHER; note = 2'-O-methyluridine-3'-phosphate
  modified_base 17: mod_base = OTHER; note = 2'-O-methyladenosine-3'-phosphate
  modified_base 18: mod_base = OTHER; note = 2'-O-methylcytidine-3'-phosphate
  modified_base 19: mod_base = OTHER; note = 2'-O-methyladenosine-3'-phosphorothioate
  modified_base 20: mod_base = OTHER; note = 2'-O-methyladenosine-3'-phosphorothioate
  modified_base 21: mod_base = OTHER; note = 2'-O-methyladenosine-3'-phosphate
gtcgaggagtaacaatacaaa

SEQ ID NO: 847 - RNA, 21 nt, synthetic construct
  source 1..21: mol_type = other RNA
  modified_base 1: mod_base = OTHER; note = 2'-O-methylguanosine-3'-phosphorothioate
  modified_base 2: mod_base = OTHER; note = 2'-O-methyluridine-3'-phosphorothioate
  modified_base 3: mod_base = OTHER; note = 2'-O-methylcytidine-3'-phosphate
  modified_base 4: mod_base = OTHER; note = 2'-O-methylguanosine-3'-phosphate
  modified_base 5: mod_base = OTHER; note = 2'-O-methyladenosine-3'-phosphate
  modified_base 6: mod_base = OTHER; note = 2'-O-methylguanosine-3'-phosphate
  modified_base 7: mod_base = OTHER; note = 2'-O-methylguanosine-3'-phosphate
  modified_base 8: mod_base = OTHER; note = 2'-O-methyladenosine-3'-phosphate
  modified_base 9: mod_base = OTHER; note = 2'-fluoroguanosine-3'-phosphate
  modified_base 10: mod_base = OTHER; note = 2'-fluorouridine-3'-phosphate
  modified_base 11: mod_base = OTHER; note = 2'-fluoroadenosine-3'-phosphate
  modified_base 12: mod_base = OTHER; note = 2'-O-methyladenosine-3'-phosphate
  modified_base 13: mod_base = OTHER; note = 2'-O-methylcytidine-3'-phosphate
  modified_base 14: mod_base = OTHER; note = 2'-O-methyladenosine-3'-phosphate
  modified_base 15: mod_base = OTHER; note = 2'-O-methyladenosine-3'-phosphate
  modified_base 16: mod_base = OTHER; note = 2'-O-methyluridine-3'-phosphate
  modified_base 17: mod_base = OTHER; note = 2'-O-methyladenosine-3'-phosphate
  modified_base 18: mod_base = OTHER; note = 2'-O-methylcytidine-3'-phosphate
  modified_base 19: mod_base = OTHER; note = 2'-O-methyladenosine-3'-phosphorothioate
  modified_base 20: mod_base = OTHER; note = 2'-O-methyladenosine-3'-phosphorothioate
  modified_base 21: mod_base = OTHER; note = 2'-O-methyladenosine-3'-phosphate
gtcgaggagtaacaatacaaa

SEQ ID NO: 848 - RNA, 21 nt, synthetic construct
  source 1..21: mol_type = other RNA
  modified_base 1: mod_base = OTHER; note = 2'-O-methyladenosine-3'-phosphorothioate
  modified_base 2: mod_base = OTHER; note = 2'-O-methyluridine-3'-phosphorothioate
  modified_base 3: mod_base = OTHER; note = 2'-O-methylcytidine-3'-phosphate
  modified_base 4: mod_base = OTHER; note = 2'-O-methyladenosine-3'-phosphate
  modified_base 5: mod_base = OTHER; note = 2'-O-methyladenosine-3'-phosphate
  modified_base 6: mod_base = OTHER; note = 2'-O-methyladenosine-3'-phosphate
  modified_base 7: mod_base = OTHER; note = 2'-fluorocytidine-3'-phosphate
  modified_base 8: mod_base = OTHER; note = 2'-O-methylcytidine-3'-phosphate
  modified_base 9: mod_base = OTHER; note = 2'-fluorocytidine-3'-phosphate
  modified_base 10: mod_base = OTHER; note = 2'-fluorouridine-3'-phosphate
  modified_base 11: mod_base = OTHER; note = 2'-fluoroadenosine-3'-phosphate
  modified_base 12: mod_base = OTHER; note = 2'-O-methylguanosine-3'-phosphate
  modified_base 13: mod_base = OTHER; note = 2'-O-methylcytidine-3'-phosphate
  modified_base 14: mod_base = OTHER; note = 2'-O-methylcytidine-3'-phosphate
  modified_base 15: mod_base = OTHER; note = 2'-O-methyluridine-3'-phosphate
  modified_base 16: mod_base = OTHER; note = 2'-O-methyluridine-3'-phosphate
  modified_base 17: mod_base = OTHER; note = 2'-O-methylguanosine-3'-phosphate
  modified_base 18: mod_base = OTHER; note = 2'-O-methylcytidine-3'-phosphate
  modified_base 19: mod_base = OTHER; note = 2'-O-methyluridine-3'-phosphorothioate
  modified_base 20: mod_base = OTHER; note = 2'-O-methyluridine-3'-phosphorothioate
  modified_base 21: mod_base = OTHER; note = 2'-O-methyladenosine-3'-phosphate
atcaaaccctagccttgctta

SEQ ID NO: 849 - RNA, 21 nt, synthetic construct
  source 1..21: mol_type = other RNA
  modified_base 1: mod_base = OTHER; note = 2'-O-methyluridine-3'-phosphorothioate
  modified_base 2: mod_base = OTHER; note = 2'-O-methyluridine-3'-phosphorothioate
  modified_base 3: mod_base = OTHER; note = 2'-O-methyluridine-3'-phosphate
  modified_base 4: mod_base = OTHER; note = 2'-O-methylguanosine-3'-phosphate
  modified_base 5: mod_base = OTHER; note = 2'-O-methylcytidine-3'-phosphate
  modified_base 6: mod_base = OTHER; note = 2'-O-methyluridine-3'-phosphate
  modified_base 7: mod_base = OTHER; note = 2'-fluorouridine-3'-phosphate
  modified_base 8: mod_base = OTHER; note = 2'-O-methylguanosine-3'-phosphate
  modified_base 9: mod_base = OTHER; note = 2'-fluorocytidine-3'-phosphate
  modified_base 10: mod_base = OTHER; note = 2'-fluorouridine-3'-phosphate
  modified_base 11: mod_base = OTHER; note = 2'-fluorouridine-3'-phosphate
  modified_base 12: mod_base = OTHER; note = 2'-O-methyluridine-3'-phosphate
  modified_base 13: mod_base = OTHER; note = 2'-O-methylguanosine-3'-phosphate
  modified_base 14: mod_base = OTHER; note = 2'-O-methyladenosine-3'-phosphate
  modified_base 15: mod_base = OTHER; note = 2'-O-methyladenosine-3'-phosphate
  modified_base 16: mod_base = OTHER; note = 2'-O-methylguanosine-3'-phosphate
  modified_base 17: mod_base = OTHER; note = 2'-O-methyluridine-3'-phosphate
  modified_base 18: mod_base = OTHER; note = 2'-O-methyladenosine-3'-phosphate
  modified_base 19: mod_base = OTHER; note = 2'-O-methylguanosine-3'-phosphorothioate
  modified_base 20: mod_base = OTHER; note = 2'-O-methylcytidine-3'-phosphorothioate
  modified_base 21: mod_base = OTHER; note = 2'-O-methyladenosine-3'-phosphate
tttgcttgctttgaagtagca

SEQ ID NO: 850 - RNA, 21 nt, synthetic construct
  source 1..21: mol_type = other RNA
  modified_base 1: mod_base = OTHER; note = 2'-O-methyluridine-3'-phosphorothioate
  modified_base 2: mod_base = OTHER; note = 2'-O-methylguanosine-3'-phosphorothioate
  modified_base 3: mod_base = OTHER; note = 2'-O-methylcytidine-3'-phosphate
  modified_base 4: mod_base = OTHER; note = 2'-O-methyluridine-3'-phosphate
  modified_base 5: mod_base = OTHER; note = 2'-O-methyluridine-3'-phosphate
  modified_base 6: mod_base = OTHER; note = 2'-O-methylguanosine-3'-phosphate
  modified_base 7: mod_base = OTHER; note = 2'-fluorocytidine-3'-phosphate
  modified_base 8: mod_base = OTHER; note = 2'-O-methyluridine-3'-phosphate
  modified_base 9: mod_base = OTHER; note = 2'-fluorouridine-3'-phosphate
  modified_base 10: mod_base = OTHER; note = 2'-fluorouridine-3'-phosphate
  modified_base 11: mod_base = OTHER; note = 2'-fluoroguanosine-3'-phosphate
  modified_base 12: mod_base = OTHER; note = 2'-O-methyladenosine-3'-phosphate
  modified_base 13: mod_base = OTHER; note = 2'-O-methyladenosine-3'-phosphate
  modified_base 14: mod_base = OTHER; note = 2'-O-methylguanosine-3'-phosphate
  modified_base 15: mod_base = OTHER; note = 2'-O-methyluridine-3'-phosphate
  modified_base 16: mod_base = OTHER; note = 2'-O-methyladenosine-3'-phosphate
  modified_base 17: mod_base = OTHER; note = 2'-O-methylguanosine-3'-phosphate
  modified_base 18: mod_base = OTHER; note = 2'-O-methylcytidine-3'-phosphate
  modified_base 19: mod_base = OTHER; note = 2'-O-methyluridine-3'-phosphorothioate
  modified_base 20: mod_base = OTHER; note = 2'-O-methylcytidine-3'-phosphorothioate
  modified_base 21: mod_base = OTHER; note = 2'-O-methyladenosine-3'-phosphate
tgcttgctttgaagtagctca

SEQ ID NO: 851 - RNA, 21 nt, synthetic construct
  source 1..21: mol_type = other RNA
  modified_base 1: mod_base = OTHER; note = 2'-O-methylguanosine-3'-phosphorothioate
  modified_base 2: mod_base = OTHER; note = 2'-O-methylcytidine-3'-phosphorothioate
  modified_base 3: mod_base = OTHER; note = 2'-O-methyluridine-3'-phosphate
  modified_base 4: mod_base = OTHER; note = 2'-O-methyluridine-3'-phosphate
  modified_base 5: mod_base = OTHER; note = 2'-O-methylguanosine-3'-phosphate
  modified_base 6: mod_base = OTHER; note = 2'-O-methylcytidine-3'-phosphate
  modified_base 7: mod_base = OTHER; note = 2'-fluorouridine-3'-phosphate
  modified_base 8: mod_base = OTHER; note = 2'-O-methyluridine-3'-phosphate
  modified_base 9: mod_base = OTHER; note = 2'-fluorouridine-3'-phosphate
  modified_base 10: mod_base = OTHER; note = 2'-fluoroguanosine-3'-phosphate
  modified_base 11: mod_base = OTHER; note = 2'-fluoroadenosine-3'-phosphate
  modified_base 12: mod_base = OTHER; note = 2'-O-methyladenosine-3'-phosphate
  modified_base 13: mod_base = OTHER; note = 2'-O-methylguanosine-3'-phosphate
  modified_base 14: mod_base = OTHER; note = 2'-O-methyluridine-3'-phosphate
  modified_base 15: mod_base = OTHER; note = 2'-O-methyladenosine-3'-phosphate
  modified_base 16: mod_base = OTHER; note = 2'-O-methylguanosine-3'-phosphate
  modified_base 17: mod_base = OTHER; note = 2'-O-methylcytidine-3'-phosphate
  modified_base 18: mod_base = OTHER; note = 2'-O-methyluridine-3'-phosphate
  modified_base 19: mod_base = OTHER; note = 2'-O-methylcytidine-3'-phosphorothioate
  modified_base 20: mod_base = OTHER; note = 2'-O-methyluridine-3'-phosphorothioate
  modified_base 21: mod_base = OTHER; note = 2'-O-methyladenosine-3'-phosphate
gcttgctttgaagtagctcta

SEQ ID NO: 852 - RNA, 21 nt, synthetic construct
  source 1..21: mol_type = other RNA
  modified_base 1: mod_base = OTHER; note = 2'-O-methyladenosine-3'-phosphorothioate
  modified_base 2: mod_base = OTHER; note = 2'-O-methyladenosine-3'-phosphorothioate
  modified_base 3: mod_base = OTHER; note = 2'-O-methylguanosine-3'-phosphate
  modified_base 4: mod_base = OTHER; note = 2'-O-methyluridine-3'-phosphate
  modified_base 5: mod_base = OTHER; note = 2'-O-methylcytidine-3'-phosphate
  modified_base 6: mod_base = OTHER; note = 2'-O-methyluridine-3'-phosphate
  modified_base 7: mod_base = OTHER; note = 2'-O-methylcytidine-3'-phosphate
  modified_base 8: mod_base = OTHER; note = 2'-O-methyluridine-3'-phosphate
  modified_base 9: mod_base = OTHER; note = 2'-fluorocytidine-3'-phosphate
  modified_base 10: mod_base = OTHER; note = 2'-fluoroguanosine-3'-phosphate
  modified_base 11: mod_base = OTHER; note = 2'-fluorouridine-3'-phosphate
  modified_base 12: mod_base = OTHER; note = 2'-O-methyladenosine-3'-phosphate
  modified_base 13: mod_base = OTHER; note = 2'-O-methylguanosine-3'-phosphate
  modified_base 14: mod_base = OTHER; note = 2'-O-methyluridine-3'-phosphate
  modified_base 15: mod_base = OTHER; note = 2'-O-methylguanosine-3'-phosphate
  modified_base 16: mod_base = OTHER; note = 2'-O-methyluridine-3'-phosphate
  modified_base 17: mod_base = OTHER; note = 2'-O-methyluridine-3'-phosphate
  modified_base 18: mod_base = OTHER; note = 2'-O-methyladenosine-3'-phosphate
  modified_base 19: mod_base = OTHER; note = 2'-O-methyladenosine-3'-phosphorothioate
  modified_base 20: mod_base = OTHER; note = 2'-O-methylguanosine-3'-phosphorothioate
  modified_base 21: mod_base = OTHER; note = 2'-O-methyladenosine-3'-phosphate
aagtctctcgtagtgttaaga

SEQ ID NO: 853 - RNA, 21 nt, synthetic construct
  source 1..21: mol_type = other RNA
  modified_base 1: mod_base = OTHER; note = 2'-O-methyluridine-3'-phosphorothioate
  modified_base 2: mod_base = OTHER; note = 2'-O-methylcytidine-3'-phosphorothioate
  modified_base 3: mod_base = OTHER; note = 2'-O-methyluridine-3'-phosphate
  modified_base 4: mod_base = OTHER; note = 2'-O-methylcytidine-3'-phosphate
  modified_base 5: mod_base = OTHER; note = 2'-O-methyluridine-3'-phosphate
  modified_base 6: mod_base = OTHER; note = 2'-O-methylcytidine-3'-phosphate
  modified_base 7: mod_base = OTHER; note = 2'-fluoroguanosine-3'-phosphate
  modified_base 8: mod_base = OTHER; note = 2'-O-methyluridine-3'-phosphate
  modified_base 9: mod_base = OTHER; note = 2'-fluoroadenosine-3'-phosphate
  modified_base 10: mod_base = OTHER; note = 2'-fluoroguanosine-3'-phosphate
  modified_base 11: mod_base = OTHER; note = 2'-fluorouridine-3'-phosphate
  modified_base 12: mod_base = OTHER; note = 2'-O-methylguanosine-3'-phosphate
  modified_base 13: mod_base = OTHER; note = 2'-O-methyluridine-3'-phosphate
  modified_base 14: mod_base = OTHER; note = 2'-O-methyluridine-3'-phosphate
  modified_base 15: mod_base = OTHER; note = 2'-O-methyladenosine-3'-phosphate
  modified_base 16: mod_base = OTHER; note = 2'-O-methyladenosine-3'-phosphate
  modified_base 17: mod_base = OTHER; note = 2'-O-methylguanosine-3'-phosphate
  modified_base 18: mod_base = OTHER; note = 2'-O-methyluridine-3'-phosphate
  modified_base 19: mod_base = OTHER; note = 2'-O-methyluridine-3'-phosphorothioate
  modified_base 20: mod_base = OTHER; note = 2'-O-methyladenosine-3'-phosphorothioate
  modified_base 21: mod_base = OTHER; note = 2'-O-methyladenosine-3'-phosphate
tctctcgtagtgttaagttaa

SEQ ID NO: 854 - RNA, 21 nt, synthetic construct
  source 1..21: mol_type = other RNA
  modified_base 1: mod_base = OTHER; note = 2'-O-methylcytidine-3'-phosphorothioate
  modified_base 2: mod_base = OTHER; note = 2'-O-methyluridine-3'-phosphorothioate
  modified_base 3: mod_base = OTHER; note = 2'-O-methylcytidine-3'-phosphate
  modified_base 4: mod_base = OTHER; note = 2'-O-methyluridine-3'-phosphate
  modified_base 5: mod_base = OTHER; note = 2'-O-methylcytidine-3'-phosphate
  modified_base 6: mod_base = OTHER; note = 2'-O-methylguanosine-3'-phosphate
  modified_base 7: mod_base = OTHER; note = 2'-fluorouridine-3'-phosphate
  modified_base 8: mod_base = OTHER; note = 2'-O-methyladenosine-3'-phosphate
  modified_base 9: mod_base = OTHER; note = 2'-fluoroguanosine-3'-phosphate
  modified_base 10: mod_base = OTHER; note = 2'-fluorouridine-3'-phosphate
  modified_base 11: mod_base = OTHER; note = 2'-fluoroguanosine-3'-phosphate
  modified_base 12: mod_base = OTHER; note = 2'-O-methyluridine-3'-phosphate
  modified_base 13: mod_base = OTHER; note = 2'-O-methyluridine-3'-phosphate
  modified_base 14: mod_base = OTHER; note = 2'-O-methyladenosine-3'-phosphate
  modified_base 15: mod_base = OTHER; note = 2'-O-methyladenosine-3'-phosphate
  modified_base 16: mod_base = OTHER; note = 2'-O-methylguanosine-3'-phosphate
  modified_base 17: mod_base = OTHER; note = 2'-O-methyluridine-3'-phosphate
  modified_base 18: mod_base = OTHER; note = 2'-O-methyluridine-3'-phosphate
  modified_base 19: mod_base = OTHER; note = 2'-O-methyladenosine-3'-phosphorothioate
  modified_base 20: mod_base = OTHER; note = 2'-O-methyluridine-3'-phosphorothioate
  modified_base 21: mod_base = OTHER; note = 2'-O-methyladenosine-3'-phosphate
ctctcgtagtgttaagttata

SEQ ID NO: 855 - RNA, 21 nt, synthetic construct
  source 1..21: mol_type = other RNA
  modified_base 1: mod_base = OTHER; note = 2'-O-methylcytidine-3'-phosphorothioate
  modified_base 2: mod_base = OTHER; note = 2'-O-methyluridine-3'-phosphorothioate
  modified_base 3: mod_base = OTHER; note = 2'-O-methylcytidine-3'-phosphate
  modified_base 4: mod_base = OTHER; note = 2'-O-methyluridine-3'-phosphate
  modified_base 5: mod_base = OTHER; note = 2'-O-methylcytidine-3'-phosphate
  modified_base 6: mod_base = OTHER; note = 2'-O-methylguanosine-3'-phosphate
  modified_base 7: mod_base = OTHER; note = 2'-O-methyluridine-3'-phosphate
  modified_base 8: mod_base = OTHER; note = 2'-O-methyladenosine-3'-phosphate
  modified_base 9: mod_base = OTHER; note = 2'-fluoroguanosine-3'-phosphate
  modified_base 10: mod_base = OTHER; note = 2'-fluorouridine-3'-phosphate
  modified_base 11: mod_base = OTHER; note = 2'-fluoroguanosine-3'-phosphate
  modified_base 12: mod_base = OTHER; note = 2'-O-methyluridine-3'-phosphate
  modified_base 13: mod_base = OTHER; note = 2'-O-methyluridine-3'-phosphate
  modified_base 14: mod_base = OTHER; note = 2'-O-methyladenosine-3'-phosphate
  modified_base 15: mod_base = OTHER; note = 2'-O-methyladenosine-3'-phosphate
  modified_base 16: mod_base = OTHER; note = 2'-O-methylguanosine-3'-phosphate
  modified_base 17: mod_base = OTHER; note = 2'-O-methyluridine-3'-phosphate
  modified_base 18: mod_base = OTHER; note = 2'-O-methyluridine-3'-phosphate
  modified_base 19: mod_base = OTHER; note = 2'-O-methyladenosine-3'-phosphorothioate
  modified_base 20: mod_base = OTHER; note = 2'-O-methyluridine-3'-phosphorothioate
  modified_base 21: mod_base = OTHER; note = 2'-O-methyladenosine-3'-phosphate
ctctcgtagtgttaagttata

SEQ ID NO: 856 - RNA, 21 nt, synthetic construct
  source 1..21: mol_type = other RNA
  modified_base 1: mod_base = OTHER; note = 2'-O-methylcytidine-3'-phosphorothioate
  modified_base 2: mod_base = OTHER; note = 2'-O-methyluridine-3'-phosphorothioate
  modified_base 3: mod_base = OTHER; note = 2'-O-methylcytidine-3'-phosphate
  modified_base 4: mod_base = OTHER; note = 2'-O-methylguanosine-3'-phosphate
  modified_base 5: mod_base = OTHER; note = 2'-O-methyluridine-3'-phosphate
  modified_base 6: mod_base = OTHER; note = 2'-O-methyladenosine-3'-phosphate
  modified_base 7: mod_base = OTHER; note = 2'-O-methylguanosine-3'-phosphate
  modified_base 8: mod_base = OTHER; note = 2'-O-methyluridine-3'-phosphate
  modified_base 9: mod_base = OTHER; note = 2'-fluoroguanosine-3'-phosphate
  modified_base 10: mod_base = OTHER; note = 2'-fluorouridine-3'-phosphate
  modified_base 11: mod_base = OTHER; note = 2'-fluorouridine-3'-phosphate
  modified_base 12: mod_base = OTHER; note = 2'-O-methyladenosine-3'-phosphate
  modified_base 13: mod_base = OTHER; note = 2'-O-methyladenosine-3'-phosphate
  modified_base 14: mod_base = OTHER; note = 2'-O-methylguanosine-3'-phosphate
  modified_base 15: mod_base = OTHER; note = 2'-O-methyluridine-3'-phosphate
  modified_base 16: mod_base = OTHER; note = 2'-O-methyluridine-3'-phosphate
  modified_base 17: mod_base = OTHER; note = 2'-O-methyladenosine-3'-phosphate
  modified_base 18: mod_base = OTHER; note = 2'-O-methyluridine-3'-phosphate
  modified_base 19: mod_base = OTHER; note = 2'-O-methyladenosine-3'-phosphorothioate
  modified_base 20: mod_base = OTHER; note = 2'-O-methylguanosine-3'-phosphorothioate
  modified_base 21: mod_base = OTHER; note = 2'-O-methyladenosine-3'-phosphate
ctcgtagtgttaagttataga

SEQ ID NO: 857 - RNA, 21 nt, synthetic construct
  source 1..21: mol_type = other RNA
  modified_base 1: mod_base = OTHER; note = 2'-O-methylcytidine-3'-phosphorothioate
  modified_base 2: mod_base = OTHER; note = 2'-O-methylguanosine-3'-phosphorothioate
  modified_base 3: mod_base = OTHER; note = 2'-O-methyluridine-3'-phosphate
  modified_base 4: mod_base = OTHER; note = 2'-O-methyladenosine-3'-phosphate
  modified_base 5: mod_base = OTHER; note = 2'-O-methylguanosine-3'-phosphate
  modified_base 6: mod_base = OTHER; note = 2'-O-methyluridine-3'-phosphate
  modified_base 7: mod_base = OTHER; note = 2'-O-methylguanosine-3'-phosphate
  modified_base 8: mod_base = OTHER; note = 2'-O-methyluridine-3'-phosphate
  modified_base 9: mod_base = OTHER; note = 2'-fluorouridine-3'-phosphate
  modified_base 10: mod_base = OTHER; note = 2'-fluoroadenosine-3'-phosphate
  modified_base 11: mod_base = OTHER; note = 2'-fluoroadenosine-3'-phosphate
  modified_base 12: mod_base = OTHER; note = 2'-O-methylguanosine-3'-phosphate
  modified_base 13: mod_base = OTHER; note = 2'-O-methyluridine-3'-phosphate
  modified_base 14: mod_base = OTHER; note = 2'-O-methyluridine-3'-phosphate
  modified_base 15: mod_base = OTHER; note = 2'-O-methyladenosine-3'-phosphate
  modified_base 16: mod_base = OTHER; note = 2'-O-methyluridine-3'-phosphate
  modified_base 17: mod_base = OTHER; note = 2'-O-methyladenosine-3'-phosphate
  modified_base 18: mod_base = OTHER; note = 2'-O-methylguanosine-3'-phosphate
  modified_base 19: mod_base = OTHER; note = 2'-O-methyluridine-3'-phosphorothioate
  modified_base 20: mod_base = OTHER; note = 2'-O-methylguanosine-3'-phosphorothioate
  modified_base 21: mod_base = OTHER; note = 2'-O-methyladenosine-3'-phosphate
cgtagtgttaagttatagtga

SEQ ID NO: 858 - RNA, 21 nt, synthetic construct
  source 1..21: mol_type = other RNA
  modified_base 1: mod_base = OTHER; note = 2'-O-methyluridine-3'-phosphorothioate
  modified_base 2: mod_base = OTHER; note = 2'-O-methyladenosine-3'-phosphorothioate
  modified_base 3: mod_base = OTHER; note = 2'-O-methylguanosine-3'-phosphate
  modified_base 4: mod_base = OTHER; note = 2'-O-methyluridine-3'-phosphate
  modified_base 5: mod_base = OTHER; note = 2'-O-methylguanosine-3'-phosphate
  modified_base 6: mod_base = OTHER; note = 2'-O-methyluridine-3'-phosphate
  modified_base 7: mod_base = OTHER; note = 2'-fluorouridine-3'-phosphate
  modified_base 8: mod_base = OTHER; note = 2'-O-methyladenosine-3'-phosphate
  modified_base 9: mod_base = OTHER; note = 2'-fluoroadenosine-3'-phosphate
  modified_base 10: mod_base = OTHER; note = 2'-fluoroguanosine-3'-phosphate
  modified_base 11: mod_base = OTHER; note = 2'-fluorouridine-3'-phosphate
  modified_base 12: mod_base = OTHER; note = 2'-O-methyluridine-3'-phosphate
  modified_base 13: mod_base = OTHER; note = 2'-O-methyladenosine-3'-phosphate
  modified_base 14: mod_base = OTHER; note = 2'-O-methyluridine-3'-phosphate
  modified_base 15: mod_base = OTHER; note = 2'-O-methyladenosine-3'-phosphate
  modified_base 16: mod_base = OTHER; note = 2'-O-methylguanosine-3'-phosphate
  modified_base 17: mod_base = OTHER; note = 2'-O-methyluridine-3'-phosphate
  modified_base 18: mod_base = OTHER; note = 2'-O-methylguanosine-3'-phosphate
  modified_base 19: mod_base = OTHER; note = 2'-O-methyladenosine-3'-phosphorothioate
  modified_base 20: mod_base = OTHER; note = 2'-O-methyladenosine-3'-phosphorothioate
  modified_base 21: mod_base = OTHER; note = 2'-O-methyladenosine-3'-phosphate
tagtgttaagttatagtgaaa

SEQ ID NO: 859 - RNA, 21 nt, synthetic construct
  source 1..21: mol_type = other RNA
  modified_base 1: mod_base = OTHER; note = 2'-O-methylguanosine-3'-phosphorothioate
  modified_base 2: mod_base = OTHER; note = 2'-O-methyluridine-3'-phosphorothioate
  modified_base 3: mod_base = OTHER; note = 2'-O-methylguanosine-3'-phosphate
  modified_base 4: mod_base = OTHER; note = 2'-O-methyladenosine-3'-phosphate
  modified_base 5: mod_base = OTHER; note = 2'-O-methyladenosine-3'-phosphate
  modified_base 6: mod_base = OTHER; note = 2'-O-methyluridine-3'-phosphate
  modified_base 7: mod_base = OTHER; note = 2'-fluoroadenosine-3'-phosphate
  modified_base 8: mod_base = OTHER; note = 2'-O-methylcytidine-3'-phosphate
  modified_base 9: mod_base = OTHER; note = 2'-fluorouridine-3'-phosphate
  modified_base 10: mod_base = OTHER; note = 2'-fluoroguanosine-3'-phosphate
  modified_base 11: mod_base = OTHER; note = 2'-fluorocytidine-3'-phosphate
  modified_base 12: mod_base = OTHER; note = 2'-O-methyluridine-3'-phosphate
  modified_base 13: mod_base = OTHER; note = 2'-O-methyladenosine-3'-phosphate
  modified_base 14: mod_base = OTHER; note = 2'-O-methylcytidine-3'-phosphate
  modified_base 15: mod_base = OTHER; note = 2'-O-methyladenosine-3'-phosphate
  modified_base 16: mod_base = OTHER; note = 2'-O-methylguanosine-3'-phosphate
  modified_base 17: mod_base = OTHER; note = 2'-O-methylcytidine-3'-phosphate
  modified_base 18: mod_base = OTHER; note = 2'-O-methyladenosine-3'-phosphate
  modified_base 19: mod_base = OTHER; note = 2'-O-methyladenosine-3'-phosphorothioate
  modified_base 20: mod_base = OTHER; note = 2'-O-methyluridine-3'-phosphorothioate
  modified_base 21: mod_base = OTHER; note = 2'-O-methyladenosine-3'-phosphate
gtgaatactgctacagcaata

SEQ ID NO: 860 - RNA, 21 nt, synthetic construct
  source 1..21: mol_type = other RNA
  modified_base 1: mod_base = OTHER; note = 2'-O-methylcytidine-3'-phosphorothioate
  modified_base 2: mod_base = OTHER; note = 2'-O-methyluridine-3'-phosphorothioate
  modified_base 3: mod_base = OTHER; note = 2'-O-methylguanosine-3'-phosphate
  modified_base 4: mod_base = OTHER; note = 2'-O-methylcytidine-3'-phosphate
  modified_base 5: mod_base = OTHER; note = 2'-O-methyluridine-3'-phosphate
  modified_base 6: mod_base = OTHER; note = 2'-O-methyladenosine-3'-phosphate
  modified_base 7: mod_base = OTHER; note = 2'-O-methylcytidine-3'-phosphate
  modified_base 8: mod_base = OTHER; note = 2'-O-methyladenosine-3'-phosphate
  modified_base 9: mod_base = OTHER; note = 2'-fluoroguanosine-3'-phosphate
  modified_base 10: mod_base = OTHER; note = 2'-fluorocytidine-3'-phosphate
  modified_base 11: mod_base = OTHER; note = 2'-fluoroadenosine-3'-phosphate
  modified_base 12: mod_base = OTHER; note = 2'-O-methyladenosine-3'-phosphate
  modified_base 13: mod_base = OTHER; note = 2'-O-methyluridine-3'-phosphate
  modified_base 14: mod_base = OTHER; note = 2'-O-methyluridine-3'-phosphate
  modified_base 15: mod_base = OTHER; note = 2'-O-methyluridine-3'-phosphate
  modified_base 16: mod_base = OTHER; note = 2'-O-methylcytidine-3'-phosphate
  modified_base 17: mod_base = OTHER; note = 2'-O-methyluridine-3'-phosphate
  modified_base 18: mod_base = OTHER; note = 2'-O-methyladenosine-3'-phosphate
  modified_base 19: mod_base = OTHER; note = 2'-O-methyladenosine-3'-phosphorothioate
  modified_base 20: mod_base = OTHER; note = 2'-O-methyluridine-3'-phosphorothioate
  modified_base 21: mod_base = OTHER; note = 2'-O-methyladenosine-3'-phosphate
ctgctacagcaatttctaata

SEQ ID NO: 861 - RNA, 21 nt, synthetic construct
  source 1..21: mol_type = other RNA
  modified_base 1: mod_base = OTHER; note = 2'-O-methylguanosine-3'-phosphorothioate
  modified_base 2: mod_base = OTHER; note = 2'-O-methyladenosine-3'-phosphorothioate
  modified_base 3: mod_base = OTHER; note = 2'-O-methyladenosine-3'-phosphate
  modified_base 4: mod_base = OTHER; note = 2'-O-methyluridine-3'-phosphate
  modified_base 5: mod_base = OTHER; note = 2'-O-methyluridine-3'-phosphate
  modified_base 6: mod_base = OTHER; note = 2'-O-methylguanosine-3'-phosphate
  modified_base 7: mod_base = OTHER; note = 2'-fluoroadenosine-3'-phosphate
  modified_base 8: mod_base = OTHER; note = 2'-O-methylguanosine-3'-phosphate
  modified_base 9: mod_base = OTHER; note = 2'-fluorouridine-3'-phosphate
  modified_base 10: mod_base = OTHER; note = 2'-fluoroadenosine-3'-phosphate
  modified_base 11: mod_base = OTHER; note = 2'-fluoroadenosine-3'-phosphate
  modified_base 12: mod_base = OTHER; note = 2'-O-methyluridine-3'-phosphate
  modified_base 13: mod_base = OTHER; note = 2'-O-methylguanosine-3'-phosphate
  modified_base 14: mod_base = OTHER; note = 2'-O-methylguanosine-3'-phosphate
  modified_base 15: mod_base = OTHER; note = 2'-O-methyluridine-3'-phosphate
  modified_base 16: mod_base = OTHER; note = 2'-O-methylguanosine-3'-phosphate
  modified_base 17: mod_base = OTHER; note = 2'-O-methyluridine-3'-phosphate
  modified_base 18: mod_base = OTHER; note = 2'-O-methyladenosine-3'-phosphate
  modified_base 19: mod_base = OTHER; note = 2'-O-methylguanosine-3'-phosphorothioate
  modified_base 20: mod_base = OTHER; note = 2'-O-methyladenosine-3'-phosphorothioate
  modified_base 21: mod_base = OTHER; note = 2'-O-methyladenosine-3'-phosphate
gaattgagtaatggtgtagaa

SEQ ID NO: 862 - RNA, 21 nt, synthetic construct
  source 1..21: mol_type = other RNA
  modified_base 1: mod_base = OTHER; note = 2'-O-methyluridine-3'-phosphorothioate
  modified_base 2: mod_base = OTHER; note = 2'-O-methyluridine-3'-phosphorothioate
  modified_base 3: mod_base = OTHER; note = 2'-O-methylguanosine-3'-phosphate
  modified_base 4: mod_base = OTHER; note = 2'-O-methyladenosine-3'-phosphate
  modified_base 5: mod_base = OTHER; note = 2'-O-methylguanosine-3'-phosphate
  modified_base 6: mod_base = OTHER; note = 2'-O-methyluridine-3'-phosphate
  modified_base 7: mod_base = OTHER; note = 2'-fluoroadenosine-3'-phosphate
  modified_base 8: mod_base = OTHER; note = 2'-O-methyladenosine-3'-phosphate
  modified_base 9: mod_base = OTHER; note = 2'-fluorouridine-3'-phosphate
  modified_base 10: mod_base = OTHER; note = 2'-fluoroguanosine-3'-phosphate
  modified_base 11: mod_base = OTHER; note = 2'-fluoroguanosine-3'-phosphate
  modified_base 12: mod_base = OTHER; note = 2'-O-methyluridine-3'-phosphate
  modified_base 13: mod_base = OTHER; note = 2'-O-methylguanosine-3'-phosphate
  modified_base 14: mod_base = OTHER; note = 2'-O-methyluridine-3'-phosphate
  modified_base 15: mod_base = OTHER; note = 2'-O-methyladenosine-3'-phosphate
  modified_base 16: mod_base = OTHER; note = 2'-O-methylguanosine-3'-phosphate
  modified_base 17: mod_base = OTHER; note = 2'-O-methyladenosine-3'-phosphate
  modified_base 18: mod_base = OTHER; note = 2'-O-methyladenosine-3'-phosphate
  modified_base 19: mod_base = OTHER; note = 2'-O-methylcytidine-3'-phosphorothioate
  modified_base 20: mod_base = OTHER; note = 2'-O-methyladenosine-3'-phosphorothioate
  modified_base 21: mod_base = OTHER; note = 2'-O-methyladenosine-3'-phosphate
ttgagtaatggtgtagaacaa

SEQ ID NO: 863 - RNA, 21 nt, synthetic construct
  source 1..21: mol_type = other RNA
  modified_base 1: mod_base = OTHER; note = 2'-O-methylguanosine-3'-phosphorothioate
  modified_base 2: mod_base = OTHER; note = 2'-O-methyladenosine-3'-phosphorothioate
  modified_base 3: mod_base = OTHER; note = 2'-O-methylguanosine-3'-phosphate
  modified_base 4: mod_base = OTHER; note = 2'-O-methyluridine-3'-phosphate
  modified_base 5: mod_base = OTHER; note = 2'-O-methyladenosine-3'-phosphate
  modified_base 6: mod_base = OTHER; note = 2'-O-methyladenosine-3'-phosphate
  modified_base 7: mod_base = OTHER; note = 2'-fluorouridine-3'-phosphate
  modified_base 8: mod_base = OTHER; note = 2'-O-methylguanosine-3'-phosphate
  modified_base 9: mod_base = OTHER; note = 2'-fluoroguanosine-3'-phosphate
  modified_base 10: mod_base = OTHER; note = 2'-fluorouridine-3'-phosphate
  modified_base 11: mod_base = OTHER; note = 2'-fluoroguanosine-3'-phosphate
  modified_base 12: mod_base = OTHER; note = 2'-O-methyluridine-3'-phosphate
  modified_base 13: mod_base = OTHER; note = 2'-O-methyladenosine-3'-phosphate
  modified_base 14: mod_base = OTHER; note = 2'-O-methylguanosine-3'-phosphate
  modified_base 15: mod_base = OTHER; note = 2'-O-methyladenosine-3'-phosphate
  modified_base 16: mod_base = OTHER; note = 2'-O-methyladenosine-3'-phosphate
  modified_base 17: mod_base = OTHER; note = 2'-O-methylcytidine-3'-phosphate
  modified_base 18: mod_base = OTHER; note = 2'-O-methyladenosine-3'-phosphate
  modified_base 19: mod_base = OTHER; note = 2'-O-methylcytidine-3'-phosphorothioate
  modified_base 20: mod_base = OTHER; note = 2'-O-methyluridine-3'-phosphorothioate
  modified_base 21: mod_base = OTHER; note = 2'-O-methyladenosine-3'-phosphate
gagtaatggtgtagaacacta

SEQ ID NO: 864 - RNA, 21 nt, synthetic construct
  source 1..21: mol_type = other RNA
  modified_base 1: mod_base = OTHER; note = 2'-O-methyladenosine-3'-phosphorothioate
  modified_base 2: mod_base = OTHER; note = 2'-O-methylguanosine-3'-phosphorothioate
  modified_base 3: mod_base = OTHER; note = 2'-O-methyluridine-3'-phosphate
  modified_base 4: mod_base = OTHER; note = 2'-O-methyladenosine-3'-phosphate
  modified_base 5: mod_base = OTHER; note = 2'-O-methyladenosine-3'-phosphate
  modified_base 6: mod_base = OTHER; note = 2'-O-methyluridine-3'-phosphate
  modified_base 7: mod_base = OTHER; note = 2'-fluoroguanosine-3'-phosphate
  modified_base 8: mod_base = OTHER; note = 2'-O-methylguanosine-3'-phosphate
  modified_base 9: mod_base = OTHER; note = 2'-fluorouridine-3'-phosphate
  modified_base 10: mod_base = OTHER; note = 2'-fluoroguanosine-3'-phosphate
  modified_base 11: mod_base = OTHER; note = 2'-fluorouridine-3'-phosphate
  modified_base 12: mod_base = OTHER; note = 2'-O-methyladenosine-3'-phosphate
  modified_base 13: mod_base = OTHER; note = 2'-O-methylguanosine-3'-phosphate
  modified_base 14: mod_base = OTHER; note = 2'-O-methyladenosine-3'-phosphate
  modified_base 15: mod_base = OTHER; note = 2'-O-methyladenosine-3'-phosphate
  modified_base 16: mod_base = OTHER; note = 2'-O-methylcytidine-3'-phosphate
  modified_base 17: mod_base = OTHER; note = 2'-O-methyladenosine-3'-phosphate
  modified_base 18: mod_base = OTHER; note = 2'-O-methylcytidine-3'-phosphate
  modified_base 19: mod_base = OTHER; note = 2'-O-methyluridine-3'-phosphorothioate
  modified_base 20: mod_base = OTHER; note = 2'-O-methyladenosine-3'-phosphorothioate
  modified_base 21: mod_base = OTHER; note = 2'-O-methyladenosine-3'-phosphate
agtaatggtgtagaacactaa

SEQ ID NO: 865 - RNA, 21 nt, synthetic construct
  source 1..21: mol_type = other RNA
  modified_base 1: mod_base = OTHER; note = 2'-O-methyluridine-3'-phosphorothioate
  modified_base 2: mod_base = OTHER; note = 2'-O-methyladenosine-3'-phosphorothioate
  modified_base 3: mod_base = OTHER; note = 2'-O-methyladenosine-3'-phosphate
  modified_base 4: mod_base = OTHER; note = 2'-O-methyluridine-3'-phosphate
  modified_base 5: mod_base = OTHER; note = 2'-O-methylguanosine-3'-phosphate
  modified_base 6: mod_base = OTHER; note = 2'-O-methylguanosine-3'-phosphate
  modified_base 7: mod_base = OTHER; note = 2'-fluorouridine-3'-phosphate
  modified_base 8: mod_base = OTHER; note = 2'-O-methylguanosine-3'-phosphate
  modified_base 9: mod_base = OTHER; note = 2'-fluorouridine-3'-phosphate
  modified_base 10: mod_base = OTHER; note = 2'-fluoroadenosine-3'-phosphate
  modified_base 11: mod_base = OTHER; note = 2'-fluoroguanosine-3'-phosphate
  modified_base 12: mod_base = OTHER; note = 2'-O-methyladenosine-3'-phosphate
  modified_base 13: mod_base = OTHER; note = 2'-O-methyladenosine-3'-phosphate
  modified_base 14: mod_base = OTHER; note = 2'-O-methylcytidine-3'-phosphate
  modified_base 15: mod_base = OTHER; note = 2'-O-methyladenosine-3'-phosphate
  modified_base 16: mod_base = OTHER; note = 2'-O-methylcytidine-3'-phosphate
  modified_base 17: mod_base = OTHER; note = 2'-O-methyluridine-3'-phosphate
  modified_base 18: mod_base = OTHER; note = 2'-O-methyladenosine-3'-phosphate
  modified_base 19: mod_base = OTHER; note = 2'-O-methyladenosine-3'-phosphorothioate
  modified_base 20: mod_base = OTHER; note = 2'-O-methyluridine-3'-phosphorothioate
  modified_base 21: mod_base = OTHER; note = 2'-O-methyladenosine-3'-phosphate
taatggtgtagaacactaata

SEQ ID NO: 866 - RNA, 21 nt, synthetic construct
  source 1..21: mol_type = other RNA
  modified_base 1: mod_base = OTHER; note = 2'-O-methyladenosine-3'-phosphorothioate
  modified_base 2: mod_base = OTHER; note = 2'-O-methyluridine-3'-phosphorothioate
  modified_base 3: mod_base = OTHER; note = 2'-O-methylguanosine-3'-phosphate
  modified_base 4: mod_base = OTHER; note = 2'-O-methylguanosine-3'-phosphate
  modified_base 5: mod_base = OTHER; note = 2'-O-methyluridine-3'-phosphate
  modified_base 6: mod_base = OTHER; note = 2'-O-methylguanosine-3'-phosphate
  modified_base 7: mod_base = OTHER; note = 2'-O-methyluridine-3'-phosphate
  modified_base 8: mod_base = OTHER; note = 2'-O-methyladenosine-3'-phosphate
  modified_base 9: mod_base = OTHER; note = 2'-fluoroguanosine-3'-phosphate
  modified_base 10: mod_base = OTHER; note = 2'-fluoroadenosine-3'-phosphate
  modified_base 11: mod_base = OTHER; note = 2'-fluoroadenosine-3'-phosphate
  modified_base 12: mod_base = OTHER; note = 2'-O-methylcytidine-3'-phosphate
  modified_base 13: mod_base = OTHER; note = 2'-O-methyladenosine-3'-phosphate
  modified_base 14: mod_base = OTHER; note = 2'-O-methylcytidine-3'-phosphate
  modified_base 15: mod_base = OTHER; note = 2'-O-methyluridine-3'-phosphate
  modified_base 16: mod_base = OTHER; note = 2'-O-methyladenosine-3'-phosphate
  modified_base 17: mod_base = OTHER; note = 2'-O-methyladenosine-3'-phosphate
  modified_base 18: mod_base = OTHER; note = 2'-O-methyluridine-3'-phosphate
  modified_base 19: mod_base = OTHER; note = 2'-O-methyluridine-3'-phosphorothioate
  modified_base 20: mod_base = OTHER; note = 2'-O-methylcytidine-3'-phosphorothioate
  modified_base 21: mod_base = OTHER; note = 2'-O-methyladenosine-3'-phosphate
atggtgtagaacactaattca

SEQ ID NO: 867 - RNA, 21 nt, synthetic construct
  source 1..21: mol_type = other RNA
  modified_base 1: mod_base = OTHER; note = 2'-O-methyluridine-3'-phosphorothioate
  modified_base 2: mod_base = OTHER; note = 2'-O-methylguanosine-3'-phosphorothioate
  modified_base 3: mod_base = OTHER; note = 2'-O-methylguanosine-3'-phosphate
  modified_base 4: mod_base = OTHER; note = 2'-O-methyluridine-3'-phosphate
  modified_base 5: mod_base = OTHER; note = 2'-O-methylguanosine-3'-phosphate
  modified_base 6: mod_base = OTHER; note = 2'-O-methyluridine-3'-phosphate
  modified_base 7: mod_base = OTHER; note = 2'-O-methyladenosine-3'-phosphate
  modified_base 8: mod_base = OTHER; note = 2'-O-methylguanosine-3'-phosphate
  modified_base 9: mod_base = OTHER; note = 2'-fluoroadenosine-3'-phosphate
  modified_base 10: mod_base = OTHER; note = 2'-fluoroadenosine-3'-phosphate
  modified_base 11: mod_base = OTHER; note = 2'-fluorocytidine-3'-phosphate
  modified_base 12: mod_base = OTHER; note = 2'-O-methyladenosine-3'-phosphate
  modified_base 13: mod_base = OTHER; note = 2'-O-methylcytidine-3'-phosphate
  modified_base 14: mod_base = OTHER; note = 2'-O-methyluridine-3'-phosphate
  modified_base 15: mod_base = OTHER; note = 2'-O-methyladenosine-3'-phosphate
  modified_base 16: mod_base = OTHER; note = 2'-O-methyladenosine-3'-phosphate
  modified_base 17: mod_base = OTHER; note = 2'-O-methyluridine-3'-phosphate
  modified_base 18: mod_base = OTHER; note = 2'-O-methyluridine-3'-phosphate
  modified_base 19: mod_base = OTHER; note = 2'-O-methylcytidine-3'-phosphorothioate
  modified_base 20: mod_base = OTHER; note = 2'-O-methyladenosine-3'-phosphorothioate
  modified_base 21: mod_base = OTHER; note = 2'-O-methyladenosine-3'-phosphate
tggtgtagaacactaattcaa

SEQ ID NO: 868 - RNA, 21 nt, synthetic construct
  source 1..21: mol_type = other RNA
  modified_base 1: mod_base = OTHER; note = 2'-O-methylguanosine-3'-phosphorothioate
  modified_base 2: mod_base = OTHER; note = 2'-O-methylguanosine-3'-phosphorothioate
  modified_base 3: mod_base = OTHER; note = 2'-O-methyluridine-3'-phosphate
  modified_base 4: mod_base = OTHER; note = 2'-O-methylguanosine-3'-phosphate
  modified_base 5: mod_base = OTHER; note = 2'-O-methyluridine-3'-phosphate
  modified_base 6: mod_base = OTHER; note = 2'-O-methyladenosine-3'-phosphate
  modified_base 7: mod_base = OTHER; note = 2'-O-methylguanosine-3'-phosphate
  modified_base 8: mod_base = OTHER; note = 2'-O-methyladenosine-3'-phosphate
  modified_base 9: mod_base = OTHER; note = 2'-fluoroadenosine-3'-phosphate
  modified_base 10: mod_base = OTHER; note = 2'-fluorocytidine-3'-phosphate
  modified_base 11: mod_base = OTHER; note = 2'-fluoroadenosine-3'-phosphate
  modified_base 12: mod_base = OTHER; note = 2'-O-methylcytidine-3'-phosphate
  modified_base 13: mod_base = OTHER; note = 2'-O-methyluridine-3'-phosphate
  modified_base 14: mod_base = OTHER; note = 2'-O-methyladenosine-3'-phosphate
  modified_base 15: mod_base = OTHER; note = 2'-O-methyladenosine-3'-phosphate
  modified_base 16: mod_base = OTHER; note = 2'-O-methyluridine-3'-phosphate
  modified_base 17: mod_base = OTHER; note = 2'-O-methyluridine-3'-phosphate
  modified_base 18: mod_base = OTHER; note = 2'-O-methylcytidine-3'-phosphate
  modified_base 19: mod_base = OTHER; note = 2'-O-methyladenosine-3'-phosphorothioate
  modified_base 20: mod_base = OTHER; note = 2'-O-methyluridine-3'-phosphorothioate
  modified_base 21: mod_base = OTHER; note = 2'-O-methyladenosine-3'-phosphate
ggtgtagaacactaattcata

SEQ ID NO: 869 - RNA, 21 nt, synthetic construct
  source 1..21: mol_type = other RNA
  modified_base 1: mod_base = OTHER; note = 2'-O-methylguanosine-3'-phosphorothioate
  modified_base 2: mod_base = OTHER; note = 2'-O-methyluridine-3'-phosphorothioate
  modified_base 3: mod_base = OTHER; note = 2'-O-methylguanosine-3'-phosphate
  modified_base 4: mod_base = OTHER; note = 2'-O-methyluridine-3'-phosphate
  modified_base 5: mod_base = OTHER; note = 2'-O-methyladenosine-3'-phosphate
  modified_base 6: mod_base = OTHER; note = 2'-O-methylguanosine-3'-phosphate
  modified_base 7: mod_base = OTHER; note = 2'-fluoroadenosine-3'-phosphate
  modified_base 8: mod_base = OTHER; note = 2'-O-methyladenosine-3'-phosphate
  modified_base 9: mod_base = OTHER; note = 2'-fluorocytidine-3'-phosphate
  modified_base 10: mod_base = OTHER; note = 2'-fluoroadenosine-3'-phosphate
  modified_base 11: mod_base = OTHER; note = 2'-fluorocytidine-3'-phosphate
  modified_base 12: mod_base = OTHER; note = 2'-O-methyluridine-3'-phosphate
  modified_base 13: mod_base = OTHER; note = 2'-O-methyladenosine-3'-phosphate
  modified_base 14: mod_base = OTHER; note = 2'-O-methyladenosine-3'-phosphate
  modified_base 15: mod_base = OTHER; note = 2'-O-methyluridine-3'-phosphate
  modified_base 16: mod_base = OTHER; note = 2'-O-methyluridine-3'-phosphate
  modified_base 17: mod_base = OTHER; note = 2'-O-methylcytidine-3'-phosphate
  modified_base 18: mod_base = OTHER; note = 2'-O-methyladenosine-3'-phosphate
  modified_base 19: mod_base = OTHER; note = 2'-O-methyluridine-3'-phosphorothioate
  modified_base 20: mod_base = OTHER; note = 2'-O-methyladenosine-3'-phosphorothioate
  modified_base 21: mod_base = OTHER; note = 2'-O-methyladenosine-3'-phosphate
gtgtagaacactaattcataa

SEQ ID NO: 870 - RNA, 21 nt, synthetic construct
  source 1..21: mol_type = other RNA
  modified_base 1: mod_base = OTHER; note = 2'-O-methyluridine-3'-phosphorothioate
  modified_base 2: mod_base = OTHER; note = 2'-O-methylguanosine-3'-phosphorothioate
  modified_base 3: mod_base = OTHER; note = 2'-O-methyluridine-3'-phosphate
  modified_base 4: mod_base = OTHER; note = 2'-O-methyladenosine-3'-phosphate
  modified_base 5: mod_base = OTHER; note = 2'-O-methylguanosine-3'-phosphate
  modified_base 6: mod_base = OTHER; note = 2'-O-methyladenosine-3'-phosphate
  modified_base 7: mod_base = OTHER; note = 2'-fluoroadenosine-3'-phosphate
  modified_base 8: mod_base = OTHER; note = 2'-O-methylcytidine-3'-phosphate
  modified_base 9: mod_base = OTHER; note = 2'-fluoroadenosine-3'-phosphate
  modified_base 10: mod_base = OTHER; note = 2'-fluorocytidine-3'-phosphate
  modified_base 11: mod_base = OTHER; note = 2'-fluorouridine-3'-phosphate
  modified_base 12: mod_base = OTHER; note = 2'-O-methyladenosine-3'-phosphate
  modified_base 13: mod_base = OTHER; note = 2'-O-methyladenosine-3'-phosphate
  modified_base 14: mod_base = OTHER; note = 2'-O-methyluridine-3'-phosphate
  modified_base 15: mod_base = OTHER; note = 2'-O-methyluridine-3'-phosphate
  modified_base 16: mod_base = OTHER; note = 2'-O-methylcytidine-3'-phosphate
  modified_base 17: mod_base = OTHER; note = 2'-O-methyladenosine-3'-phosphate
  modified_base 18: mod_base = OTHER; note = 2'-O-methyluridine-3'-phosphate
  modified_base 19: mod_base = OTHER; note = 2'-O-methyladenosine-3'-phosphorothioate
  modified_base 20: mod_base = OTHER; note = 2'-O-methyladenosine-3'-phosphorothioate
  modified_base 21: mod_base = OTHER; note = 2'-O-methyladenosine-3'-phosphate
tgtagaacactaattcataaa

SEQ ID NO: 871 - RNA, 21 nt, synthetic construct
  source 1..21: mol_type = other RNA
  modified_base 1: mod_base = OTHER; note = 2'-O-methylguanosine-3'-phosphorothioate
  modified_base 2: mod_base = OTHER; note = 2'-O-methyluridine-3'-phosphorothioate
  modified_base 3: mod_base = OTHER; note = 2'-O-methyladenosine-3'-phosphate
  modified_base 4: mod_base = OTHER; note = 2'-O-methylguanosine-3'-phosphate
  modified_base 5: mod_base = OTHER; note = 2'-O-methyladenosine-3'-phosphate
  modified_base 6: mod_base = OTHER; note = 2'-O-methyladenosine-3'-phosphate
  modified_base 7: mod_base = OTHER; note = 2'-O-methylcytidine-3'-phosphate
  modified_base 8: mod_base = OTHER; note = 2'-O-methyladenosine-3'-phosphate
  modified_base 9: mod_base = OTHER; note = 2'-fluorocytidine-3'-phosphate
  modified_base 10: mod_base = OTHER; note = 2'-fluorouridine-3'-phosphate
  modified_base 11: mod_base = OTHER; note = 2'-fluoroadenosine-3'-phosphate
  modified_base 12: mod_base = OTHER; note = 2'-O-methyladenosine-3'-phosphate
  modified_base 13: mod_base = OTHER; note = 2'-O-methyluridine-3'-phosphate
  modified_base 14: mod_base = OTHER; note = 2'-O-methyluridine-3'-phosphate
  modified_base 15: mod_base = OTHER; note = 2'-O-methylcytidine-3'-phosphate
  modified_base 16: mod_base = OTHER; note = 2'-O-methyladenosine-3'-phosphate
  modified_base 17: mod_base = OTHER; note = 2'-O-methyluridine-3'-phosphate
  modified_base 18: mod_base = OTHER; note = 2'-O-methyladenosine-3'-phosphate
  modified_base 19: mod_base = OTHER; note = 2'-O-methyladenosine-3'-phosphorothioate
  modified_base 20: mod_base = OTHER; note = 2'-O-methyluridine-3'-phosphorothioate
  modified_base 21: mod_base = OTHER; note = 2'-O-methyladenosine-3'-phosphate
gtagaacactaattcataata

SEQ ID NO: 872 - RNA, 21 nt, synthetic construct
  source 1..21: mol_type = other RNA
  modified_base 1: mod_base = OTHER; note = 2'-O-methyluridine-3'-phosphorothioate
  modified_base 2: mod_base = OTHER; note = 2'-O-methyladenosine-3'-phosphorothioate
  modified_base 3: mod_base = OTHER; note = 2'-O-methylguanosine-3'-phosphate
  modified_base 4: mod_base = OTHER; note = 2'-O-methyladenosine-3'-phosphate
  modified_base 5: mod_base = OTHER; note = 2'-O-methyladenosine-3'-phosphate
  modified_base 6: mod_base = OTHER; note = 2'-O-methylcytidine-3'-phosphate
  modified_base 7: mod_base = OTHER; note = 2'-O-methyladenosine-3'-phosphate
  modified_base 8: mod_base = OTHER; note = 2'-O-methylcytidine-3'-phosphate
  modified_base 9: mod_base = OTHER; note = 2'-fluorouridine-3'-phosphate
  modified_base 10: mod_base = OTHER; note = 2'-fluoroadenosine-3'-phosphate
  modified_base 11: mod_base = OTHER; note = 2'-fluoroadenosine-3'-phosphate
  modified_base 12: mod_base = OTHER; note = 2'-O-methyluridine-3'-phosphate
  modified_base 13: mod_base = OTHER; note = 2'-O-methyluridine-3'-phosphate
  modified_base 14: mod_base = OTHER; note = 2'-O-methylcytidine-3'-phosphate
  modified_base 15: mod_base = OTHER; note = 2'-O-methyladenosine-3'-phosphate
  modified_base 16: mod_base = OTHER; note = 2'-O-methyluridine-3'-phosphate
  modified_base 17: mod_base = OTHER; note = 2'-O-methyladenosine-3'-phosphate
  modified_base 18: mod_base = OTHER; note = 2'-O-methyladenosine-3'-phosphate
  modified_base 19: mod_base = OTHER; note = 2'-O-methyluridine-3'-phosphorothioate
  modified_base 20: mod_base = OTHER; note = 2'-O-methylcytidine-3'-phosphorothioate
  modified_base 21: mod_base = OTHER; note = 2'-O-methyladenosine-3'-phosphate
tagaacactaattcataatca

SEQ ID NO: 873 - RNA, 21 nt, synthetic construct
  source 1..21: mol_type = other RNA
  modified_base 1: mod_base = OTHER; note = 2'-O-methyladenosine-3'-phosphorothioate
  modified_base 2: mod_base = OTHER; note = 2'-O-methylguanosine-3'-phosphorothioate
  modified_base 3: mod_base = OTHER; note = 2'-O-methyladenosine-3'-phosphate
  modified_base 4: mod_base = OTHER; note = 2'-O-methyladenosine-3'-phosphate
  modified_base 5: mod_base = OTHER; note = 2'-O-methylcytidine-3'-phosphate
  modified_base 6: mod_base = OTHER; note = 2'-O-methyladenosine-3'-phosphate
  modified_base 7: mod_base = OTHER; note = 2'-O-methylcytidine-3'-phosphate
  modified_base 8: mod_base = OTHER; note = 2'-O-methyluridine-3'-phosphate
  modified_base 9: mod_base = OTHER; note = 2'-fluoroadenosine-3'-phosphate
  modified_base 10: mod_base = OTHER; note = 2'-fluoroadenosine-3'-phosphate
  modified_base 11: mod_base = OTHER; note = 2'-fluorouridine-3'-phosphate
  modified_base 12: mod_base = OTHER; note = 2'-O-methyluridine-3'-phosphate
  modified_base 13: mod_base = OTHER; note = 2'-O-methylcytidine-3'-phosphate
  modified_base 14: mod_base = OTHER; note = 2'-O-methyladenosine-3'-phosphate
  modified_base 15: mod_base = OTHER; note = 2'-O-methyluridine-3'-phosphate
  modified_base 16: mod_base = OTHER; note = 2'-O-methyladenosine-3'-phosphate
  modified_base 17: mod_base = OTHER; note = 2'-O-methyladenosine-3'-phosphate
  modified_base 18: mod_base = OTHER; note = 2'-O-methyluridine-3'-phosphate
  modified_base 19: mod_base = OTHER; note = 2'-O-methylcytidine-3'-phosphorothioate
  modified_base 20: mod_base = OTHER; note = 2'-O-methyladenosine-3'-phosphorothioate
  modified_base 21: mod_base = OTHER; note = 2'-O-methyladenosine-3'-phosphate
agaacactaattcataatcaa

SEQ ID NO: 874 - RNA, 21 nt, synthetic construct
  source 1..21: mol_type = other RNA
  modified_base 1: mod_base = OTHER; note = 2'-O-methyladenosine-3'-phosphorothioate
  modified_base 2: mod_base = OTHER; note = 2'-O-methylguanosine-3'-phosphorothioate
  modified_base 3: mod_base = OTHER; note = 2'-O-methyladenosine-3'-phosphate
  modified_base 4: mod_base = OTHER; note = 2'-O-methyladenosine-3'-phosphate
  modified_base 5: mod_base = OTHER; note = 2'-O-methylcytidine-3'-phosphate
  modified_base 6: mod_base = OTHER; note = 2'-O-methyladenosine-3'-phosphate
  modified_base 7: mod_base = OTHER; note = 2'-fluorocytidine-3'-phosphate
  modified_base 8: mod_base = OTHER; note = 2'-O-methyluridine-3'-phosphate
  modified_base 9: mod_base = OTHER; note = 2'-fluoroadenosine-3'-phosphate
  modified_base 10: mod_base = OTHER; note = 2'-fluoroadenosine-3'-phosphate
  modified_base 11: mod_base = OTHER; note = 2'-fluorouridine-3'-phosphate
  modified_base 12: mod_base = OTHER; note = 2'-O-methyluridine-3'-phosphate
  modified_base 13: mod_base = OTHER; note = 2'-O-methylcytidine-3'-phosphate
  modified_base 14: mod_base = OTHER; note = 2'-O-methyladenosine-3'-phosphate
  modified_base 15: mod_base = OTHER; note = 2'-O-methyluridine-3'-phosphate
  modified_base 16: mod_base = OTHER; note = 2'-O-methyladenosine-3'-phosphate
  modified_base 17: mod_base = OTHER; note = 2'-O-methyladenosine-3'-phosphate
  modified_base 18: mod_base = OTHER; note = 2'-O-methyluridine-3'-phosphate
  modified_base 19: mod_base = OTHER; note = 2'-O-methylcytidine-3'-phosphorothioate
  modified_base 20: mod_base = OTHER; note = 2'-O-methyladenosine-3'-phosphorothioate
  modified_base 21: mod_base = OTHER; note = 2'-O-methyladenosine-3'-phosphate
agaacactaattcataatcaa

SEQ ID NO: 875 - RNA, 21 nt, synthetic construct
  source 1..21: mol_type = other RNA
  modified_base 1: mod_base = OTHER; note = 2'-O-methylguanosine-3'-phosphorothioate
  modified_base 2: mod_base = OTHER; note = 2'-O-methyladenosine-3'-phosphorothioate
  modified_base 3: mod_base = OTHER; note = 2'-O-methyladenosine-3'-phosphate
  modified_base 4: mod_base = OTHER; note = 2'-O-methylcytidine-3'-phosphate
  modified_base 5: mod_base = OTHER; note = 2'-O-methyladenosine-3'-phosphate
  modified_base 6: mod_base = OTHER; note = 2'-O-methylcytidine-3'-phosphate
  modified_base 7: mod_base = OTHER; note = 2'-O-methyluridine-3'-phosphate
  modified_base 8: mod_base = OTHER; note = 2'-O-methyladenosine-3'-phosphate
  modified_base 9: mod_base = OTHER; note = 2'-fluoroadenosine-3'-phosphate
  modified_base 10: mod_base = OTHER; note = 2'-fluorouridine-3'-phosphate
  modified_base 11: mod_base = OTHER; note = 2'-fluorouridine-3'-phosphate
  modified_base 12: mod_base = OTHER; note = 2'-O-methylcytidine-3'-phosphate
  modified_base 13: mod_base = OTHER; note = 2'-O-methyladenosine-3'-phosphate
  modified_base 14: mod_base = OTHER; note = 2'-O-methyluridine-3'-phosphate
  modified_base 15: mod_base = OTHER; note = 2'-O-methyladenosine-3'-phosphate
  modified_base 16: mod_base = OTHER; note = 2'-O-methyladenosine-3'-phosphate
  modified_base 17: mod_base = OTHER; note = 2'-O-methyluridine-3'-phosphate
  modified_base 18: mod_base = OTHER; note = 2'-O-methylcytidine-3'-phosphate
  modified_base 19: mod_base = OTHER; note = 2'-O-methyladenosine-3'-phosphorothioate
  modified_base 20: mod_base = OTHER; note = 2'-O-methylcytidine-3'-phosphorothioate
  modified_base 21: mod_base = OTHER; note = 2'-O-methyladenosine-3'-phosphate
gaacactaattcataatcaca

SEQ ID NO: 876 - RNA, 21 nt, synthetic construct
  source 1..21: mol_type = other RNA
  modified_base 1: mod_base = OTHER; note = 2'-O-methyladenosine-3'-phosphorothioate
  modified_base 2: mod_base = OTHER; note = 2'-O-methyladenosine-3'-phosphorothioate
  modified_base 3: mod_base = OTHER; note = 2'-O-methylcytidine-3'-phosphate
  modified_base 4: mod_base = OTHER; note = 2'-O-methyladenosine-3'-phosphate
  modified_base 5: mod_base = OTHER; note = 2'-O-methylcytidine-3'-phosphate
  modified_base 6: mod_base = OTHER; note = 2'-O-methyluridine-3'-phosphate
  modified_base 7: mod_base = OTHER; note = 2'-fluoroadenosine-3'-phosphate
  modified_base 8: mod_base = OTHER; note = 2'-O-methyladenosine-3'-phosphate
  modified_base 9: mod_base = OTHER; note = 2'-fluorouridine-3'-phosphate
  modified_base 10: mod_base = OTHER; note = 2'-fluorouridine-3'-phosphate
  modified_base 11: mod_base = OTHER; note = 2'-fluorocytidine-3'-phosphate
  modified_base 12: mod_base = OTHER; note = 2'-O-methyladenosine-3'-phosphate
  modified_base 13: mod_base = OTHER; note = 2'-O-methyluridine-3'-phosphate
  modified_base 14: mod_base = OTHER; note = 2'-O-methyladenosine-3'-phosphate
  modified_base 15: mod_base = OTHER; note = 2'-O-methyladenosine-3'-phosphate
  modified_base 16: mod_base = OTHER; note = 2'-O-methyluridine-3'-phosphate
  modified_base 17: mod_base = OTHER; note = 2'-O-methylcytidine-3'-phosphate
  modified_base 18: mod_base = OTHER; note = 2'-O-methyladenosine-3'-phosphate
  modified_base 19: mod_base = OTHER; note = 2'-O-methylcytidine-3'-phosphorothioate
  modified_base 20: mod_base = OTHER; note = 2'-O-methyluridine-3'-phosphorothioate
  modified_base 21: mod_base = OTHER; note = 2'-O-methyladenosine-3'-phosphate
aacactaattcataatcacta

SEQ ID NO: 877 - RNA, 21 nt, synthetic construct
  source 1..21: mol_type = other RNA
  modified_base 1: mod_base = OTHER; note = 2'-O-methyladenosine-3'-phosphorothioate
  modified_base 2: mod_base = OTHER; note = 2'-O-methyluridine-3'-phosphorothioate
  modified_base 3: mod_base = OTHER; note = 2'-O-methylguanosine-3'-phosphate
  modified_base 4: mod_base = OTHER; note = 2'-O-methylguanosine-3'-phosphate
  modified_base 5: mod_base = OTHER; note = 2'-O-methyluridine-3'-phosphate
  modified_base 6: mod_base = OTHER; note = 2'-O-methylcytidine-3'-phosphate
  modified_base 7: mod_base = OTHER; note = 2'-O-methylcytidine-3'-phosphate
  modified_base 8: mod_base = OTHER; note = 2'-O-methyladenosine-3'-phosphate
  modified_base 9: mod_base = OTHER; note = 2'-fluoroadenosine-3'-phosphate
  modified_base 10: mod_base = OTHER; note = 2'-fluorouridine-3'-phosphate
  modified_base 11: mod_base = OTHER; note = 2'-fluorouridine-3'-phosphate
  modified_base 12: mod_base = OTHER; note = 2'-O-methyladenosine-3'-phosphate
  modified_base 13: mod_base = OTHER; note = 2'-O-methylguanosine-3'-phosphate
  modified_base 14: mod_base = OTHER; note = 2'-O-methyluridine-3'-phosphate
  modified_base 15: mod_base = OTHER; note = 2'-O-methyluridine-3'-phosphate
  modified_base 16: mod_base = OTHER; note = 2'-O-methyluridine-3'-phosphate
  modified_base 17: mod_base = OTHER; note = 2'-O-methylcytidine-3'-phosphate
  modified_base 18: mod_base = OTHER; note = 2'-O-methylcytidine-3'-phosphate
  modified_base 19: mod_base = OTHER; note = 2'-O-methyluridine-3'-phosphorothioate
  modified_base 20: mod_base = OTHER; note = 2'-O-methyluridine-3'-phosphorothioate
  modified_base 21: mod_base = OTHER; note = 2'-O-methyladenosine-3'-phosphate
atggtccaattagtttcctta

SEQ ID NO: 878 - RNA, 21 nt, synthetic construct
  source 1..21: mol_type = other RNA
  modified_base 1: mod_base = OTHER; note = 2'-O-methyluridine-3'-phosphorothioate
  modified_base 2: mod_base = OTHER; note = 2'-O-methyluridine-3'-phosphorothioate
  modified_base 3: mod_base = OTHER; note = 2'-O-methyluridine-3'-phosphate
  modified_base 4: mod_base = OTHER; note = 2'-O-methylguanosine-3'-phosphate
  modified_base 5: mod_base = OTHER; note = 2'-O-methylguanosine-3'-phosphate
  modified_base 6: mod_base = OTHER; note = 2'-O-methylguanosine-3'-phosphate
  modified_base 7: mod_base = OTHER; note = 2'-O-methyladenosine-3'-phosphate
  modified_base 8: mod_base = OTHER; note = 2'-O-methyluridine-3'-phosphate
  modified_base 9: mod_base = OTHER; note = 2'-fluoroadenosine-3'-phosphate
  modified_base 10: mod_base = OTHER; note = 2'-fluorouridine-3'-phosphate
  modified_base 11: mod_base = OTHER; note = 2'-fluoroguanosine-3'-phosphate
  modified_base 12: mod_base = OTHER; note = 2'-O-methyluridine-3'-phosphate
  modified_base 13: mod_base = OTHER; note = 2'-O-methyladenosine-3'-phosphate
  modified_base 14: mod_base = OTHER; note = 2'-O-methyluridine-3'-phosphate
  modified_base 15: mod_base = OTHER; note = 2'-O-methylguanosine-3'-phosphate
  modified_base 16: mod_base = OTHER; note = 2'-O-methylguanosine-3'-phosphate
  modified_base 17: mod_base = OTHER; note = 2'-O-methylguanosine-3'-phosphate
  modified_base 18: mod_base = OTHER; note = 2'-O-methyluridine-3'-phosphate
  modified_base 19: mod_base = OTHER; note = 2'-O-methyladenosine-3'-phosphorothioate
  modified_base 20: mod_base = OTHER; note = 2'-O-methylguanosine-3'-phosphorothioate
  modified_base 21: mod_base = OTHER; note = 2'-O-methyladenosine-3'-phosphate
tttgggatatgtatgggtaga

SEQ ID NO: 879 - RNA, 21 nt, synthetic construct
  source 1..21: mol_type = other RNA
  modified_base 1: mod_base = OTHER; note = 2'-O-methyluridine-3'-phosphorothioate
  modified_base 2: mod_base = OTHER; note = 2'-O-methylguanosine-3'-phosphorothioate
  modified_base 3: mod_base = OTHER; note = 2'-O-methyluridine-3'-phosphate
  modified_base 4: mod_base = OTHER; note = 2'-O-methyladenosine-3'-phosphate
  modified_base 5: mod_base = OTHER; note = 2'-O-methyluridine-3'-phosphate
  modified_base 6: mod_base = OTHER; note = 2'-O-methylguanosine-3'-phosphate
  modified_base 7: mod_base = OTHER; note = 2'-fluoroguanosine-3'-phosphate
  modified_base 8: mod_base = OTHER; note = 2'-O-methylguanosine-3'-phosphate
  modified_base 9: mod_base = OTHER; note = 2'-fluorouridine-3'-phosphate
  modified_base 10: mod_base = OTHER; note = 2'-fluoroadenosine-3'-phosphate
  modified_base 11: mod_base = OTHER; note = 2'-fluoroguanosine-3'-phosphate
  modified_base 12: mod_base = OTHER; note = 2'-O-methylguanosine-3'-phosphate
  modified_base 13: mod_base = OTHER; note = 2'-O-methylguanosine-3'-phosphate
  modified_base 14: mod_base = OTHER; note = 2'-O-methyluridine-3'-phosphate
  modified_base 15: mod_base = OTHER; note = 2'-O-methyladenosine-3'-phosphate
  modified_base 16: mod_base = OTHER; note = 2'-O-methyladenosine-3'-phosphate
  modified_base 17: mod_base = OTHER; note = 2'-O-methyladenosine-3'-phosphate
  modified_base 18: mod_base = OTHER; note = 2'-O-methyluridine-3'-phosphate
  modified_base 19: mod_base = OTHER; note = 2'-O-methylcytidine-3'-phosphorothioate
  modified_base 20: mod_base = OTHER; note = 2'-O-methyladenosine-3'-phosphorothioate
  modified_base 21: mod_base = OTHER; note = 2'-O-methyladenosine-3'-phosphate
tgtatgggtagggtaaatcaa

SEQ ID NO: 880 - RNA, 21 nt, synthetic construct
  source 1..21: mol_type = other RNA
  modified_base 1: mod_base = OTHER; note = 2'-O-methyladenosine-3'-phosphorothioate
  modified_base 2: mod_base = OTHER; note = 2'-O-methyluridine-3'-phosphorothioate
  modified_base 3: mod_base = OTHER; note = 2'-O-methylguanosine-3'-phosphate
  modified_base 4: mod_base = OTHER; note = 2'-O-methylguanosine-3'-phosphate
  modified_base 5: mod_base = OTHER; note = 2'-O-methylguanosine-3'-phosphate
  modified_base 6: mod_base = OTHER; note = 2'-O-methyluridine-3'-phosphate
  modified_base 7: mod_base = OTHER; note = 2'-fluoroadenosine-3'-phosphate
  modified_base 8: mod_base = OTHER; note = 2'-O-methylguanosine-3'-phosphate
  modified_base 9: mod_base = OTHER; note = 2'-fluoroguanosine-3'-phosphate
  modified_base 10: mod_base = OTHER; note = 2'-fluoroguanosine-3'-phosphate
  modified_base 11: mod_base = OTHER; note = 2'-fluorouridine-3'-phosphate
  modified_base 12: mod_base = OTHER; note = 2'-O-methyladenosine-3'-phosphate
  modified_base 13: mod_base = OTHER; note = 2'-O-methyladenosine-3'-phosphate
  modified_base 14: mod_base = OTHER; note = 2'-O-methyladenosine-3'-phosphate
  modified_base 15: mod_base = OTHER; note = 2'-O-methyluridine-3'-phosphate
  modified_base 16: mod_base = OTHER; note = 2'-O-methylcytidine-3'-phosphate
  modified_base 17: mod_base = OTHER; note = 2'-O-methyladenosine-3'-phosphate
  modified_base 18: mod_base = OTHER; note = 2'-O-methylguanosine-3'-phosphate
  modified_base 19: mod_base = OTHER; note = 2'-O-methyluridine-3'-phosphorothioate
  modified_base 20: mod_base = OTHER; note = 2'-O-methyladenosine-3'-phosphorothioate
  modified_base 21: mod_base = OTHER; note = 2'-O-methyladenosine-3'-phosphate
atgggtagggtaaatcagtaa

SEQ ID NO: 881 - RNA, 21 nt, synthetic construct
  source 1..21: mol_type = other RNA
  modified_base 1: mod_base = OTHER; note = 2'-O-methylguanosine-3'-phosphorothioate
  modified_base 2: mod_base = OTHER; note = 2'-O-methyluridine-3'-phosphorothioate
  modified_base 3: mod_base = OTHER; note = 2'-O-methyladenosine-3'-phosphate
  modified_base 4: mod_base = OTHER; note = 2'-O-methylguanosine-3'-phosphate
  modified_base 5: mod_base = OTHER; note = 2'-O-methylguanosine-3'-phosphate
  modified_base 6: mod_base = OTHER; note = 2'-O-methylguanosine-3'-phosphate
  modified_base 7: mod_base = OTHER; note = 2'-O-methyluridine-3'-phosphate
  modified_base 8: mod_base = OTHER; note = 2'-O-methyladenosine-3'-phosphate
  modified_base 9: mod_base = OTHER; note = 2'-fluoroadenosine-3'-phosphate
  modified_base 10: mod_base = OTHER; note = 2'-fluoroadenosine-3'-phosphate
  modified_base 11: mod_base = OTHER; note = 2'-fluorouridine-3'-phosphate
  modified_base 12: mod_base = OTHER; note = 2'-O-methylcytidine-3'-phosphate
  modified_base 13: mod_base = OTHER; note = 2'-O-methyladenosine-3'-phosphate
  modified_base 14: mod_base = OTHER; note = 2'-O-methylguanosine-3'-phosphate
  modified_base 15: mod_base = OTHER; note = 2'-O-methyluridine-3'-phosphate
  modified_base 16: mod_base = OTHER; note = 2'-O-methyladenosine-3'-phosphate
  modified_base 17: mod_base = OTHER; note = 2'-O-methyladenosine-3'-phosphate
  modified_base 18: mod_base = OTHER; note = 2'-O-methylguanosine-3'-phosphate
  modified_base 19: mod_base = OTHER; note = 2'-O-methyladenosine-3'-phosphorothioate
  modified_base 20: mod_base = OTHER; note = 2'-O-methylguanosine-3'-phosphorothioate
  modified_base 21: mod_base = OTHER; note = 2'-O-methyladenosine-3'-phosphate
gtagggtaaatcagtaagaga

SEQ ID NO: 882 - RNA, 21 nt, synthetic construct
  source 1..21: mol_type = other RNA
  modified_base 1: mod_base = OTHER; note = 2'-O-methyladenosine-3'-phosphorothioate
  modified_base 2: mod_base = OTHER; note = 2'-O-methylguanosine-3'-phosphorothioate
  modified_base 3: mod_base = OTHER; note = 2'-O-methylguanosine-3'-phosphate
  modified_base 4: mod_base = OTHER; note = 2'-O-methylguanosine-3'-phosphate
  modified_base 5: mod_base = OTHER; note = 2'-O-methyluridine-3'-phosphate
  modified_base 6: mod_base = OTHER; note = 2'-O-methyladenosine-3'-phosphate
  modified_base 7: mod_base = OTHER; note = 2'-fluoroadenosine-3'-phosphate
  modified_base 8: mod_base = OTHER; note = 2'-O-methyladenosine-3'-phosphate
  modified_base 9: mod_base = OTHER; note = 2'-fluorouridine-3'-phosphate
  modified_base 10: mod_base = OTHER; note = 2'-fluorocytidine-3'-phosphate
  modified_base 11: mod_base = OTHER; note = 2'-fluoroadenosine-3'-phosphate
  modified_base 12: mod_base = OTHER; note = 2'-O-methylguanosine-3'-phosphate
  modified_base 13: mod_base = OTHER; note = 2'-O-methyluridine-3'-phosphate
  modified_base 14: mod_base = OTHER; note = 2'-O-methyladenosine-3'-phosphate
  modified_base 15: mod_base = OTHER; note = 2'-O-methyladenosine-3'-phosphate
  modified_base 16: mod_base = OTHER; note = 2'-O-methylguanosine-3'-phosphate
  modified_base 17: mod_base = OTHER; note = 2'-O-methyladenosine-3'-phosphate
  modified_base 18: mod_base = OTHER; note = 2'-O-methylguanosine-3'-phosphate
  modified_base 19: mod_base = OTHER; note = 2'-O-methylguanosine-3'-phosphorothioate
  modified_base 20: mod_base = OTHER; note = 2'-O-methyluridine-3'-phosphorothioate
  modified_base 21: mod_base = OTHER; note = 2'-O-methyladenosine-3'-phosphate
agggtaaatcagtaagaggta

SEQ ID NO: 883 - RNA, 21 nt, synthetic construct
  source 1..21: mol_type = other RNA
  modified_base 1: mod_base = OTHER; note = 2'-O-methylguanosine-3'-phosphorothioate
  modified_base 2: mod_base = OTHER; note = 2'-O-methylguanosine-3'-phosphorothioate
  modified_base 3: mod_base = OTHER; note = 2'-O-methylguanosine-3'-phosphate
  modified_base 4: mod_base = OTHER; note = 2'-O-methyluridine-3'-phosphate
  modified_base 5: mod_base = OTHER; note = 2'-O-methyladenosine-3'-phosphate
  modified_base 6: mod_base = OTHER; note = 2'-O-methyladenosine-3'-phosphate
  modified_base 7: mod_base = OTHER; note = 2'-O-methyladenosine-3'-phosphate
  modified_base 8: mod_base = OTHER; note = 2'-O-methyluridine-3'-phosphate
  modified_base 9: mod_base = OTHER; note = 2'-fluorocytidine-3'-phosphate
  modified_base 10: mod_base = OTHER; note = 2'-fluoroadenosine-3'-phosphate
  modified_base 11: mod_base = OTHER; note = 2'-fluoroguanosine-3'-phosphate
  modified_base 12: mod_base = OTHER; note = 2'-O-methyluridine-3'-phosphate
  modified_base 13: mod_base = OTHER; note = 2'-O-methyladenosine-3'-phosphate
  modified_base 14: mod_base = OTHER; note = 2'-O-methyladenosine-3'-phosphate
  modified_base 15: mod_base = OTHER; note = 2'-O-methylguanosine-3'-phosphate
  modified_base 16: mod_base = OTHER; note = 2'-O-methyladenosine-3'-phosphate
  modified_base 17: mod_base = OTHER; note = 2'-O-methylguanosine-3'-phosphate
  modified_base 18: mod_base = OTHER; note = 2'-O-methylguanosine-3'-phosphate
  modified_base 19: mod_base = OTHER; note = 2'-O-methyluridine-3'-phosphorothioate
  modified_base 20: mod_base = OTHER; note = 2'-O-methylguanosine-3'-phosphorothioate
  modified_base 21: mod_base = OTHER; note = 2'-O-methyladenosine-3'-phosphate
gggtaaatcagtaagaggtga

SEQ ID NO: 884 - RNA, 21 nt, synthetic construct
  source 1..21: mol_type = other RNA
  modified_base 1: mod_base = OTHER; note = 2'-O-methylguanosine-3'-phosphorothioate
  modified_base 2: mod_base = OTHER; note = 2'-O-methyluridine-3'-phosphorothioate
  modified_base 3: mod_base = OTHER; note = 2'-O-methyladenosine-3'-phosphate
  modified_base 4: mod_base = OTHER; note = 2'-O-methyladenosine-3'-phosphate
  modified_base 5: mod_base = OTHER; note = 2'-O-methyladenosine-3'-phosphate
  modified_base 6: mod_base = OTHER; note = 2'-O-methyluridine-3'-phosphate
  modified_base 7: mod_base = OTHER; note = 2'-O-methylcytidine-3'-phosphate
  modified_base 8: mod_base = OTHER; note = 2'-O-methyladenosine-3'-phosphate
  modified_base 9: mod_base = OTHER; note = 2'-fluoroguanosine-3'-phosphate
  modified_base 10: mod_base = OTHER; note = 2'-fluorouridine-3'-phosphate
  modified_base 11: mod_base = OTHER; note = 2'-fluoroadenosine-3'-phosphate
  modified_base 12: mod_base = OTHER; note = 2'-O-methyladenosine-3'-phosphate
  modified_base 13: mod_base = OTHER; note = 2'-O-methylguanosine-3'-phosphate
  modified_base 14: mod_base = OTHER; note = 2'-O-methyladenosine-3'-phosphate
  modified_base 15: mod_base = OTHER; note = 2'-O-methylguanosine-3'-phosphate
  modified_base 16: mod_base = OTHER; note = 2'-O-methylguanosine-3'-phosphate
  modified_base 17: mod_base = OTHER; note = 2'-O-methyluridine-3'-phosphate
  modified_base 18: mod_base = OTHER; note = 2'-O-methylguanosine-3'-phosphate
  modified_base 19: mod_base = OTHER; note = 2'-O-methyluridine-3'-phosphorothioate
  modified_base 20: mod_base = OTHER; note = 2'-O-methyluridine-3'-phosphorothioate
  modified_base 21: mod_base = OTHER; note = 2'-O-methyladenosine-3'-phosphate
gtaaatcagtaagaggtgtta

SEQ ID NO: 885 - RNA, 21 nt, synthetic construct
  source 1..21: mol_type = other RNA
  modified_base 1: mod_base = OTHER; note = 2'-O-methyladenosine-3'-phosphorothioate
  modified_base 2: mod_base = OTHER; note = 2'-O-methyladenosine-3'-phosphorothioate
  modified_base 3: mod_base = OTHER; note = 2'-O-methyladenosine-3'-phosphate
  modified_base 4: mod_base = OTHER; note = 2'-O-methyluridine-3'-phosphate
  modified_base 5: mod_base = OTHER; note = 2'-O-methylcytidine-3'-phosphate
  modified_base 6: mod_base = OTHER; note = 2'-O-methyladenosine-3'-phosphate
  modified_base 7: mod_base = OTHER; note = 2'-fluoroguanosine-3'-phosphate
  modified_base 8: mod_base = OTHER; note = 2'-O-methyluridine-3'-phosphate
  modified_base 9: mod_base = OTHER; note = 2'-fluoroadenosine-3'-phosphate
  modified_base 10: mod_base = OTHER; note = 2'-fluoroadenosine-3'-phosphate
  modified_base 11: mod_base = OTHER; note = 2'-fluoroguanosine-3'-phosphate
  modified_base 12: mod_base = OTHER; note = 2'-O-methyladenosine-3'-phosphate
  modified_base 13: mod_base = OTHER; note = 2'-O-methylguanosine-3'-phosphate
  modified_base 14: mod_base = OTHER; note = 2'-O-methylguanosine-3'-phosphate
  modified_base 15: mod_base = OTHER; note = 2'-O-methyluridine-3'-phosphate
  modified_base 16: mod_base = OTHER; note = 2'-O-methylguanosine-3'-phosphate
  modified_base 17: mod_base = OTHER; note = 2'-O-methyluridine-3'-phosphate
  modified_base 18: mod_base = OTHER; note = 2'-O-methyluridine-3'-phosphate
  modified_base 19: mod_base = OTHER; note = 2'-O-methyladenosine-3'-phosphorothioate
  modified_base 20: mod_base = OTHER; note = 2'-O-methyluridine-3'-phosphorothioate
  modified_base 21: mod_base = OTHER; note = 2'-O-methyladenosine-3'-phosphate
aaatcagtaagaggtgttata

SEQ ID NO: 886 - RNA, 21 nt, synthetic construct
  source 1..21: mol_type = other RNA
  modified_base 1: mod_base = OTHER; note = 2'-O-methyladenosine-3'-phosphorothioate
  modified_base 2: mod_base = OTHER; note = 2'-O-methyladenosine-3'-phosphorothioate
  modified_base 3: mod_base = OTHER; note = 2'-O-methyluridine-3'-phosphate
  modified_base 4: mod_base = OTHER; note = 2'-O-methylcytidine-3'-phosphate
  modified_base 5: mod_base = OTHER; note = 2'-O-methyladenosine-3'-phosphate
  modified_base 6: mod_base = OTHER; note = 2'-O-methylguanosine-3'-phosphate
  modified_base 7: mod_base = OTHER; note = 2'-O-methyluridine-3'-phosphate
  modified_base 8: mod_base = OTHER; note = 2'-O-methyladenosine-3'-phosphate
  modified_base 9: mod_base = OTHER; note = 2'-fluoroadenosine-3'-phosphate
  modified_base 10: mod_base = OTHER; note = 2'-fluoroguanosine-3'-phosphate
  modified_base 11: mod_base = OTHER; note = 2'-fluoroadenosine-3'-phosphate
  modified_base 12: mod_base = OTHER; note = 2'-O-methylguanosine-3'-phosphate
  modified_base 13: mod_base = OTHER; note = 2'-O-methylguanosine-3'-phosphate
  modified_base 14: mod_base = OTHER; note = 2'-O-methyluridine-3'-phosphate
  modified_base 15: mod_base = OTHER; note = 2'-O-methylguanosine-3'-phosphate
  modified_base 16: mod_base = OTHER; note = 2'-O-methyluridine-3'-phosphate
  modified_base 17: mod_base = OTHER; note = 2'-O-methyluridine-3'-phosphate
  modified_base 18: mod_base = OTHER; note = 2'-O-methyladenosine-3'-phosphate
  modified_base 19: mod_base = OTHER; note = 2'-O-methyluridine-3'-phosphorothioate
  modified_base 20: mod_base = OTHER; note = 2'-O-methyluridine-3'-phosphorothioate
  modified_base 21: mod_base = OTHER; note = 2'-O-methyladenosine-3'-phosphate
aatcagtaagaggtgttatta

SEQ ID NO: 887 - RNA, 21 nt, synthetic construct
  source 1..21: mol_type = other RNA
  modified_base 1: mod_base = OTHER; note = 2'-O-methylcytidine-3'-phosphorothioate
  modified_base 2: mod_base = OTHER; note = 2'-O-methyladenosine-3'-phosphorothioate
  modified_base 3: mod_base = OTHER; note = 2'-O-methylguanosine-3'-phosphate
  modified_base 4: mod_base = OTHER; note = 2'-O-methyluridine-3'-phosphate
  modified_base 5: mod_base = OTHER; note = 2'-O-methyladenosine-3'-phosphate
  modified_base 6: mod_base = OTHER; note = 2'-O-methyladenosine-3'-phosphate
  modified_base 7: mod_base = OTHER; note = 2'-O-methylguanosine-3'-phosphate
  modified_base 8: mod_base = OTHER; note = 2'-O-methyladenosine-3'-phosphate
  modified_base 9: mod_base = OTHER; note = 2'-fluoroguanosine-3'-phosphate
  modified_base 10: mod_base = OTHER; note = 2'-fluoroguanosine-3'-phosphate
  modified_base 11: mod_base = OTHER; note = 2'-fluorouridine-3'-phosphate
  modified_base 12: mod_base = OTHER; note = 2'-O-methylguanosine-3'-phosphate
  modified_base 13: mod_base = OTHER; note = 2'-O-methyluridine-3'-phosphate
  modified_base 14: mod_base = OTHER; note = 2'-O-methyluridine-3'-phosphate
  modified_base 15: mod_base = OTHER; note = 2'-O-methyladenosine-3'-phosphate
  modified_base 16: mod_base = OTHER; note = 2'-O-methyluridine-3'-phosphate
  modified_base 17: mod_base = OTHER; note = 2'-O-methyluridine-3'-phosphate
  modified_base 18: mod_base = OTHER; note = 2'-O-methyluridine-3'-phosphate
  modified_base 19: mod_base = OTHER; note = 2'-O-methylguanosine-3'-phosphorothioate
  modified_base 20: mod_base = OTHER; note = 2'-O-methylguanosine-3'-phosphorothioate
  modified_base 21: mod_base = OTHER; note = 2'-O-methyladenosine-3'-phosphate
cagtaagaggtgttatttgga

SEQ ID NO: 888 - RNA, 21 nt, synthetic construct
  source 1..21: mol_type = other RNA
  modified_base 1: mod_base = OTHER; note = 2'-O-methyluridine-3'-phosphorothioate
  modified_base 2: mod_base = OTHER; note = 2'-O-methyluridine-3'-phosphorothioate
  modified_base 3: mod_base = OTHER; note = 2'-O-methylguanosine-3'-phosphate
  modified_base 4: mod_base = OTHER; note = 2'-O-methylguanosine-3'-phosphate
  modified_base 5: mod_base = OTHER; note = 2'-O-methyladenosine-3'-phosphate
  modified_base 6: mod_base = OTHER; note = 2'-O-methylcytidine-3'-phosphate
  modified_base 7: mod_base = OTHER; note = 2'-fluoroadenosine-3'-phosphate
  modified_base 8: mod_base = OTHER; note = 2'-O-methyluridine-3'-phosphate
  modified_base 9: mod_base = OTHER; note = 2'-fluoroguanosine-3'-phosphate
  modified_base 10: mod_base = OTHER; note = 2'-fluoroguanosine-3'-phosphate
  modified_base 11: mod_base = OTHER; note = 2'-fluorocytidine-3'-phosphate
  modified_base 12: mod_base = OTHER; note = 2'-O-methylcytidine-3'-phosphate
  modified_base 13: mod_base = OTHER; note = 2'-O-methyladenosine-3'-phosphate
  modified_base 14: mod_base = OTHER; note = 2'-O-methyluridine-3'-phosphate
  modified_base 15: mod_base = OTHER; note = 2'-O-methylguanosine-3'-phosphate
  modified_base 16: mod_base = OTHER; note = 2'-O-methylguanosine-3'-phosphate
  modified_base 17: mod_base = OTHER; note = 2'-O-methyladenosine-3'-phosphate
  modified_base 18: mod_base = OTHER; note = 2'-O-methyladenosine-3'-phosphate
  modified_base 19: mod_base = OTHER; note = 2'-O-methylcytidine-3'-phosphorothioate
  modified_base 20: mod_base = OTHER; note = 2'-O-methylcytidine-3'-phosphorothioate
  modified_base 21: mod_base = OTHER; note = 2'-O-methyladenosine-3'-phosphate
ttggacatggccatggaacca

SEQ ID NO: 889 - RNA, 21 nt, synthetic construct
  source 1..21: mol_type = other RNA
  modified_base 1: mod_base = OTHER; note = 2'-O-methyluridine-3'-phosphorothioate
  modified_base 2: mod_base = OTHER; note = 2'-O-methylguanosine-3'-phosphorothioate
  modified_base 3: mod_base = OTHER; note = 2'-O-methylguanosine-3'-phosphate
  modified_base 4: mod_base = OTHER; note = 2'-O-methyladenosine-3'-phosphate
  modified_base 5: mod_base = OTHER; note = 2'-O-methylcytidine-3'-phosphate
  modified_base 6: mod_base = OTHER; note = 2'-O-methyluridine-3'-phosphate
  modified_base 7: mod_base = OTHER; note = 2'-fluorocytidine-3'-phosphate
  modified_base 8: mod_base = OTHER; note = 2'-O-methyluridine-3'-phosphate
  modified_base 9: mod_base = OTHER; note = 2'-fluoroguanosine-3'-phosphate
  modified_base 10: mod_base = OTHER; note = 2'-fluoroguanosine-3'-phosphate
  modified_base 11: mod_base = OTHER; note = 2'-fluoroadenosine-3'-phosphate
  modified_base 12: mod_base = OTHER; note = 2'-O-methyladenosine-3'-phosphate
  modified_base 13: mod_base = OTHER; note = 2'-O-methyluridine-3'-phosphate
  modified_base 14: mod_base = OTHER; note = 2'-O-methylcytidine-3'-phosphate
  modified_base 15: mod_base = OTHER; note = 2'-O-methylcytidine-3'-phosphate
  modified_base 16: mod_base = OTHER; note = 2'-O-methyladenosine-3'-phosphate
  modified_base 17: mod_base = OTHER; note = 2'-O-methyluridine-3'-phosphate
  modified_base 18: mod_base = OTHER; note = 2'-O-methyluridine-3'-phosphate
  modified_base 19: mod_base = OTHER; note = 2'-O-methylcytidine-3'-phosphorothioate
  modified_base 20: mod_base = OTHER; note = 2'-O-methyluridine-3'-phosphorothioate
  modified_base 21: mod_base = OTHER; note = 2'-O-methyladenosine-3'-phosphate
tggactctggaatccattcta

SEQ ID NO: 890 - RNA, 21 nt, synthetic construct
  source 1..21: mol_type = other RNA
  modified_base 1: mod_base = OTHER; note = 2'-O-methylcytidine-3'-phosphorothioate
  modified_base 2: mod_base = OTHER; note = 2'-O-methyluridine-3'-phosphorothioate
  modified_base 3: mod_base = OTHER; note = 2'-O-methylcytidine-3'-phosphate
  modified_base 4: mod_base = OTHER; note = 2'-O-methyluridine-3'-phosphate
  modified_base 5: mod_base = OTHER; note = 2'-O-methylguanosine-3'-phosphate
  modified_base 6: mod_base = OTHER; note = 2'-O-methyladenosine-3'-phosphate
  modified_base 7: mod_base = OTHER; note = 2'-fluoroguanosine-3'-phosphate
  modified_base 8: mod_base = OTHER; note = 2'-O-methyluridine-3'-phosphate
  modified_base 9: mod_base = OTHER; note = 2'-fluoroguanosine-3'-phosphate
  modified_base 10: mod_base = OTHER; note = 2'-fluoroguanosine-3'-phosphate
  modified_base 11: mod_base = OTHER; note = 2'-fluorouridine-3'-phosphate
  modified_base 12: mod_base = OTHER; note = 2'-O-methyladenosine-3'-phosphate
  modified_base 13: mod_base = OTHER; note = 2'-O-methyladenosine-3'-phosphate
  modified_base 14: mod_base = OTHER; note = 2'-O-methyladenosine-3'-phosphate
  modified_base 15: mod_base = OTHER; note = 2'-O-methylguanosine-3'-phosphate
  modified_base 16: mod_base = OTHER; note = 2'-O-methylguanosine-3'-phosphate
  modified_base 17: mod_base = OTHER; note = 2'-O-methylcytidine-3'-phosphate
  modified_base 18: mod_base = OTHER; note = 2'-O-methyladenosine-3'-phosphate
  modified_base 19: mod_base = OTHER; note = 2'-O-methyladenosine-3'-phosphorothioate
  modified_base 20: mod_base = OTHER; note = 2'-O-methyluridine-3'-phosphorothioate
  modified_base 21: mod_base = OTHER; note = 2'-O-methyladenosine-3'-phosphate
ctctgagtggtaaaggcaata

SEQ ID NO: 891 - RNA, 21 nt, synthetic construct
  source 1..21: mol_type = other RNA
  modified_base 1: mod_base = OTHER; note = 2'-O-methyluridine-3'-phosphorothioate
  modified_base 2: mod_base = OTHER; note = 2'-O-methylcytidine-3'-phosphorothioate
  modified_base 3: mod_base = OTHER; note = 2'-O-methyladenosine-3'-phosphate
  modified_base 4: mod_base = OTHER; note = 2'-O-methyladenosine-3'-phosphate
  modified_base 5: mod_base = OTHER; note = 2'-O-methylguanosine-3'-phosphate
  modified_base 6: mod_base = OTHER; note = 2'-O-methyladenosine-3'-phosphate
  modified_base 7: mod_base = OTHER; note = 2'-fluoroadenosine-3'-phosphate
  modified_base 8: mod_base = OTHER; note = 2'-O-methylcytidine-3'-phosphate
  modified_base 9: mod_base = OTHER; note = 2'-fluoroadenosine-3'-phosphate
  modified_base 10: mod_base = OTHER; note = 2'-fluoroadenosine-3'-phosphate
  modified_base 11: mod_base = OTHER; note = 2'-fluoroguanosine-3'-phosphate
  modified_base 12: mod_base = OTHER; note = 2'-O-methyluridine-3'-phosphate
  modified_base 13: mod_base = OTHER; note = 2'-O-methyladenosine-3'-phosphate
  modified_base 14: mod_base = OTHER; note = 2'-O-methylguanosine-3'-phosphate
  modified_base 15: mod_base = OTHER; note = 2'-O-methylcytidine-3'-phosphate
  modified_base 16: mod_base = OTHER; note = 2'-O-methyluridine-3'-phosphate
  modified_base 17: mod_base = OTHER; note = 2'-O-methylguanosine-3'-phosphate
  modified_base 18: mod_base = OTHER; note = 2'-O-methyladenosine-3'-phosphate
  modified_base 19: mod_base = OTHER; note = 2'-O-methyluridine-3'-phosphorothioate
  modified_base 20: mod_base = OTHER; note = 2'-O-methyladenosine-3'-phosphorothioate
  modified_base 21: mod_base = OTHER; note = 2'-O-methyladenosine-3'-phosphate
tcaagaacaagtagctgataa

SEQ ID NO: 892 - RNA, 21 nt, synthetic construct
  source 1..21: mol_type = other RNA
  modified_base 1: mod_base = OTHER; note = 2'-O-methyluridine-3'-phosphorothioate
  modified_base 2: mod_base = OTHER; note = 2'-O-methyladenosine-3'-phosphorothioate
  modified_base 3: mod_base = OTHER; note = 2'-O-methylguanosine-3'-phosphate
  modified_base 4: mod_base = OTHER; note = 2'-O-methylcytidine-3'-phosphate
  modified_base 5: mod_base = OTHER; note = 2'-O-methyluridine-3'-phosphate
  modified_base 6: mod_base = OTHER; note = 2'-O-methylguanosine-3'-phosphate
  modified_base 7: mod_base = OTHER; note = 2'-fluoroadenosine-3'-phosphate
  modified_base 8: mod_base = OTHER; note = 2'-O-methyluridine-3'-phosphate
  modified_base 9: mod_base = OTHER; note = 2'-fluoroadenosine-3'-phosphate
  modified_base 10: mod_base = OTHER; note = 2'-fluorouridine-3'-phosphate
  modified_base 11: mod_base = OTHER; note = 2'-fluorouridine-3'-phosphate
  modified_base 12: mod_base = OTHER; note = 2'-O-methylguanosine-3'-phosphate
  modified_base 13: mod_base = OTHER; note = 2'-O-methyladenosine-3'-phosphate
  modified_base 14: mod_base = OTHER; note = 2'-O-methyluridine-3'-phosphate
  modified_base 15: mod_base = OTHER; note = 2'-O-methylguanosine-3'-phosphate
  modified_base 16: mod_base = OTHER; note = 2'-O-methylguanosine-3'-phosphate
  modified_base 17: mod_base = OTHER; note = 2'-O-methyladenosine-3'-phosphate
  modified_base 18: mod_base = OTHER; note = 2'-O-methylcytidine-3'-phosphate
  modified_base 19: mod_base = OTHER; note = 2'-O-methyladenosine-3'-phosphorothioate
  modified_base 20: mod_base = OTHER; note = 2'-O-methylguanosine-3'-phosphorothioate
  modified_base 21: mod_base = OTHER; note = 2'-O-methyladenosine-3'-phosphate
tagctgatattgatggacaga

SEQ ID NO: 893 - RNA, 21 nt, synthetic construct
  source 1..21: mol_type = other RNA
  modified_base 1: mod_base = OTHER; note = 2'-O-methyladenosine-3'-phosphorothioate
  modified_base 2: mod_base = OTHER; note = 2'-O-methylguanosine-3'-phosphorothioate
  modified_base 3: mod_base = OTHER; note = 2'-O-methylcytidine-3'-phosphate
  modified_base 4: mod_base = OTHER; note = 2'-O-methyluridine-3'-phosphate
  modified_base 5: mod_base = OTHER; note = 2'-O-methylguanosine-3'-phosphate
  modified_base 6: mod_base = OTHER; note = 2'-O-methyladenosine-3'-phosphate
  modified_base 7: mod_base = OTHER; note = 2'-fluorouridine-3'-phosphate
  modified_base 8: mod_base = OTHER; note = 2'-O-methyladenosine-3'-phosphate
  modified_base 9: mod_base = OTHER; note = 2'-fluorouridine-3'-phosphate
  modified_base 10: mod_base = OTHER; note = 2'-fluorouridine-3'-phosphate
  modified_base 11: mod_base = OTHER; note = 2'-fluoroguanosine-3'-phosphate
  modified_base 12: mod_base = OTHER; note = 2'-O-methyladenosine-3'-phosphate
  modified_base 13: mod_base = OTHER; note = 2'-O-methyluridine-3'-phosphate
  modified_base 14: mod_base = OTHER; note = 2'-O-methylguanosine-3'-phosphate
  modified_base 15: mod_base = OTHER; note = 2'-O-methylguanosine-3'-phosphate
  modified_base 16: mod_base = OTHER; note = 2'-O-methyladenosine-3'-phosphate
  modified_base 17: mod_base = OTHER; note = 2'-O-methylcytidine-3'-phosphate
  modified_base 18: mod_base = OTHER; note = 2'-O-methyladenosine-3'-phosphate
  modified_base 19: mod_base = OTHER; note = 2'-O-methylguanosine-3'-phosphorothioate
  modified_base 20: mod_base = OTHER; note = 2'-O-methyluridine-3'-phosphorothioate
  modified_base 21: mod_base = OTHER; note = 2'-O-methyladenosine-3'-phosphate
agctgatattgatggacagta

SEQ ID NO: 894 - RNA, 21 nt, synthetic construct
  source 1..21: mol_type = other RNA
  modified_base 1: mod_base = OTHER; note = 2'-O-methylcytidine-3'-phosphorothioate
  modified_base 2: mod_base = OTHER; note = 2'-O-methyluridine-3'-phosphorothioate
  modified_base 3: mod_base = OTHER; note = 2'-O-methylguanosine-3'-phosphate
  modified_base 4: mod_base = OTHER; note = 2'-O-methyladenosine-3'-phosphate
  modified_base 5: mod_base = OTHER; note = 2'-O-methyluridine-3'-phosphate
  modified_base 6: mod_base = OTHER; note = 2'-O-methyladenosine-3'-phosphate
  modified_base 7: mod_base = OTHER; note = 2'-fluorouridine-3'-phosphate
  modified_base 8: mod_base = OTHER; note = 2'-O-methyluridine-3'-phosphate
  modified_base 9: mod_base = OTHER; note = 2'-fluoroguanosine-3'-phosphate
  modified_base 10: mod_base = OTHER; note = 2'-fluoroadenosine-3'-phosphate
  modified_base 11: mod_base = OTHER; note = 2'-fluorouridine-3'-phosphate
  modified_base 12: mod_base = OTHER; note = 2'-O-methylguanosine-3'-phosphate
  modified_base 13: mod_base = OTHER; note = 2'-O-methylguanosine-3'-phosphate
  modified_base 14: mod_base = OTHER; note = 2'-O-methyladenosine-3'-phosphate
  modified_base 15: mod_base = OTHER; note = 2'-O-methylcytidine-3'-phosphate
  modified_base 16: mod_base = OTHER; note = 2'-O-methyladenosine-3'-phosphate
  modified_base 17: mod_base = OTHER; note = 2'-O-methylguanosine-3'-phosphate
  modified_base 18: mod_base = OTHER; note = 2'-O-methyluridine-3'-phosphate
  modified_base 19: mod_base = OTHER; note = 2'-O-methyladenosine-3'-phosphorothioate
  modified_base 20: mod_base = OTHER; note = 2'-O-methyluridine-3'-phosphorothioate
  modified_base 21: mod_base = OTHER; note = 2'-O-methyladenosine-3'-phosphate
ctgatattgatggacagtata

SEQ ID NO: 895 - RNA, 21 nt, synthetic construct
  source 1..21: mol_type = other RNA
  modified_base 1: mod_base = OTHER; note = 2'-O-methyluridine-3'-phosphorothioate
  modified_base 2: mod_base = OTHER; note = 2'-O-methylguanosine-3'-phosphorothioate
  modified_base 3: mod_base = OTHER; note = 2'-O-methyladenosine-3'-phosphate
  modified_base 4: mod_base = OTHER; note = 2'-O-methyluridine-3'-phosphate
  modified_base 5: mod_base = OTHER; note = 2'-O-methylguanosine-3'-phosphate
  modified_base 6: mod_base = OTHER; note = 2'-O-methylguanosine-3'-phosphate
  modified_base 7: mod_base = OTHER; note = 2'-fluoroadenosine-3'-phosphate
  modified_base 8: mod_base = OTHER; note = 2'-O-methylcytidine-3'-phosphate
  modified_base 9: mod_base = OTHER; note = 2'-fluoroadenosine-3'-phosphate
  modified_base 10: mod_base = OTHER; note = 2'-fluoroguanosine-3'-phosphate
  modified_base 11: mod_base = OTHER; note = 2'-fluorouridine-3'-phosphate
  modified_base 12: mod_base = OTHER; note = 2'-O-methyladenosine-3'-phosphate
  modified_base 13: mod_base = OTHER; note = 2'-O-methyluridine-3'-phosphate
  modified_base 14: mod_base = OTHER; note = 2'-O-methylguanosine-3'-phosphate
  modified_base 15: mod_base = OTHER; note = 2'-O-methylcytidine-3'-phosphate
  modified_base 16: mod_base = OTHER; note = 2'-O-methyladenosine-3'-phosphate
  modified_base 17: mod_base = OTHER; note = 2'-O-methyladenosine-3'-phosphate
  modified_base 18: mod_base = OTHER; note = 2'-O-methyluridine-3'-phosphate
  modified_base 19: mod_base = OTHER; note = 2'-O-methylguanosine-3'-phosphorothioate
  modified_base 20: mod_base = OTHER; note = 2'-O-methyladenosine-3'-phosphorothioate
  modified_base 21: mod_base = OTHER; note = 2'-O-methyladenosine-3'-phosphate
tgatggacagtatgcaatgaa

SEQ ID NO: 896 - RNA, 21 nt, synthetic construct
  source 1..21: mol_type = other RNA
  modified_base 1: mod_base = OTHER; note = 2'-O-methyladenosine-3'-phosphorothioate
  modified_base 2: mod_base = OTHER; note = 2'-O-methylguanosine-3'-phosphorothioate
  modified_base 3: mod_base = OTHER; note = 2'-O-methyluridine-3'-phosphate
  modified_base 4: mod_base = OTHER; note = 2'-O-methyladenosine-3'-phosphate
  modified_base 5: mod_base = OTHER; note = 2'-O-methyluridine-3'-phosphate
  modified_base 6: mod_base = OTHER; note = 2'-O-methylguanosine-3'-phosphate
  modified_base 7: mod_base = OTHER; note = 2'-fluorocytidine-3'-phosphate
  modified_base 8: mod_base = OTHER; note = 2'-O-methyladenosine-3'-phosphate
  modified_base 9: mod_base = OTHER; note = 2'-fluoroadenosine-3'-phosphate
  modified_base 10: mod_base = OTHER; note = 2'-fluorouridine-3'-phosphate
  modified_base 11: mod_base = OTHER; note = 2'-fluoroguanosine-3'-phosphate
  modified_base 12: mod_base = OTHER; note = 2'-O-methyladenosine-3'-phosphate
  modified_base 13: mod_base = OTHER; note = 2'-O-methylcytidine-3'-phosphate
  modified_base 14: mod_base = OTHER; note = 2'-O-methyluridine-3'-phosphate
  modified_base 15: mod_base = OTHER; note = 2'-O-methylcytidine-3'-phosphate
  modified_base 16: mod_base = OTHER; note = 2'-O-methylguanosine-3'-phosphate
  modified_base 17: mod_base = OTHER; note = 2'-O-methyladenosine-3'-phosphate
  modified_base 18: mod_base = OTHER; note = 2'-O-methylguanosine-3'-phosphate
  modified_base 19: mod_base = OTHER; note = 2'-O-methylcytidine-3'-phosphorothioate
  modified_base 20: mod_base = OTHER; note = 2'-O-methyluridine-3'-phosphorothioate
  modified_base 21: mod_base = OTHER; note = 2'-O-methyladenosine-3'-phosphate
agtatgcaatgactcgagcta

SEQ ID NO: 897 - RNA, 21 nt, synthetic construct
  source 1..21: mol_type = other RNA
  modified_base 1: mod_base = OTHER; note = 2'-O-methyladenosine-3'-phosphorothioate
  modified_base 2: mod_base = OTHER; note = 2'-O-methylguanosine-3'-phosphorothioate
  modified_base 3: mod_base = OTHER; note = 2'-O-methylcytidine-3'-phosphate
  modified_base 4: mod_base = OTHER; note = 2'-O-methyluridine-3'-phosphate
  modified_base 5: mod_base = OTHER; note = 2'-O-methylcytidine-3'-phosphate
  modified_base 6: mod_base = OTHER; note = 2'-O-methyladenosine-3'-phosphate
  modified_base 7: mod_base = OTHER; note = 2'-fluoroguanosine-3'-phosphate
  modified_base 8: mod_base = OTHER; note = 2'-O-methyladenosine-3'-phosphate
  modified_base 9: mod_base = OTHER; note = 2'-fluoroguanosine-3'-phosphate
  modified_base 10: mod_base = OTHER; note = 2'-fluoroguanosine-3'-phosphate
  modified_base 11: mod_base = OTHER; note = 2'-fluoroguanosine-3'-phosphate
  modified_base 12: mod_base = OTHER; note = 2'-O-methyluridine-3'-phosphate
  modified_base 13: mod_base = OTHER; note = 2'-O-methyladenosine-3'-phosphate
  modified_base 14: mod_base = OTHER; note = 2'-O-methylcytidine-3'-phosphate
  modified_base 15: mod_base = OTHER; note = 2'-O-methylguanosine-3'-phosphate
  modified_base 16: mod_base = OTHER; note = 2'-O-methyladenosine-3'-phosphate
  modified_base 17: mod_base = OTHER; note = 2'-O-methylguanosine-3'-phosphate
  modified_base 18: mod_base = OTHER; note = 2'-O-methylcytidine-3'-phosphate
  modified_base 19: mod_base = OTHER; note = 2'-O-methyluridine-3'-phosphorothioate
  modified_base 20: mod_base = OTHER; note = 2'-O-methylguanosine-3'-phosphorothioate
  modified_base 21: mod_base = OTHER; note = 2'-O-methyladenosine-3'-phosphate
agctcagagggtacgagctga

SEQ ID NO: 898 - RNA, 21 nt, synthetic construct
  source 1..21: mol_type = other RNA
  modified_base 1: mod_base = OTHER; note = 2'-O-methylcytidine-3'-phosphorothioate
  modified_base 2: mod_base = OTHER; note = 2'-O-methyluridine-3'-phosphorothioate
  modified_base 3: mod_base = OTHER; note = 2'-O-methylcytidine-3'-phosphate
  modified_base 4: mod_base = OTHER; note = 2'-O-methyladenosine-3'-phosphate
  modified_base 5: mod_base = OTHER; note = 2'-O-methylguanosine-3'-phosphate
  modified_base 6: mod_base = OTHER; note = 2'-O-methyladenosine-3'-phosphate
  modified_base 7: mod_base = OTHER; note = 2'-fluoroguanosine-3'-phosphate
  modified_base 8: mod_base = OTHER; note = 2'-O-methylguanosine-3'-phosphate
  modified_base 9: mod_base = OTHER; note = 2'-fluoroguanosine-3'-phosphate
  modified_base 10: mod_base = OTHER; note = 2'-fluorouridine-3'-phosphate
  modified_base 11: mod_base = OTHER; note = 2'-fluoroadenosine-3'-phosphate
  modified_base 12: mod_base = OTHER; note = 2'-O-methylcytidine-3'-phosphate
  modified_base 13: mod_base = OTHER; note = 2'-O-methylguanosine-3'-phosphate
  modified_base 14: mod_base = OTHER; note = 2'-O-methyladenosine-3'-phosphate
  modified_base 15: mod_base = OTHER; note = 2'-O-methylguanosine-3'-phosphate
  modified_base 16: mod_base = OTHER; note = 2'-O-methylcytidine-3'-phosphate
  modified_base 17: mod_base = OTHER; note = 2'-O-methyluridine-3'-phosphate
  modified_base 18: mod_base = OTHER; note = 2'-O-methylguanosine-3'-phosphate
  modified_base 19: mod_base = OTHER; note = 2'-O-methylcytidine-3'-phosphorothioate
  modified_base 20: mod_base = OTHER; note = 2'-O-methyluridine-3'-phosphorothioate
  modified_base 21: mod_base = OTHER; note = 2'-O-methyladenosine-3'-phosphate
ctcagagggtacgagctgcta

SEQ ID NO: 899 - RNA, 21 nt, synthetic construct
  source 1..21: mol_type = other RNA
  modified_base 1: mod_base = OTHER; note = 2'-O-methyladenosine-3'-phosphorothioate
  modified_base 2: mod_base = OTHER; note = 2'-O-methylguanosine-3'-phosphorothioate
  modified_base 3: mod_base = OTHER; note = 2'-O-methyladenosine-3'-phosphate
  modified_base 4: mod_base = OTHER; note = 2'-O-methylguanosine-3'-phosphate
  modified_base 5: mod_base = OTHER; note = 2'-O-methylguanosine-3'-phosphate
  modified_base 6: mod_base = OTHER; note = 2'-O-methylguanosine-3'-phosphate
  modified_base 7: mod_base = OTHER; note = 2'-fluorouridine-3'-phosphate
  modified_base 8: mod_base = OTHER; note = 2'-O-methyladenosine-3'-phosphate
  modified_base 9: mod_base = OTHER; note = 2'-fluorocytidine-3'-phosphate
  modified_base 10: mod_base = OTHER; note = 2'-fluoroguanosine-3'-phosphate
  modified_base 11: mod_base = OTHER; note = 2'-fluoroadenosine-3'-phosphate
  modified_base 12: mod_base = OTHER; note = 2'-O-methylguanosine-3'-phosphate
  modified_base 13: mod_base = OTHER; note = 2'-O-methylcytidine-3'-phosphate
  modified_base 14: mod_base = OTHER; note = 2'-O-methyluridine-3'-phosphate
  modified_base 15: mod_base = OTHER; note = 2'-O-methylguanosine-3'-phosphate
  modified_base 16: mod_base = OTHER; note = 2'-O-methylcytidine-3'-phosphate
  modified_base 17: mod_base = OTHER; note = 2'-O-methyluridine-3'-phosphate
  modified_base 18: mod_base = OTHER; note = 2'-O-methyladenosine-3'-phosphate
  modified_base 19: mod_base = OTHER; note = 2'-O-methyluridine-3'-phosphorothioate
  modified_base 20: mod_base = OTHER; note = 2'-O-methylguanosine-3'-phosphorothioate
  modified_base 21: mod_base = OTHER; note = 2'-O-methyladenosine-3'-phosphate
agagggtacgagctgctatga

SEQ ID NO: 900 - RNA, 21 nt, synthetic construct
  source 1..21: mol_type = other RNA
  modified_base 1: mod_base = OTHER; note = 2'-O-methylguanosine-3'-phosphorothioate
  modified_base 2: mod_base = OTHER; note = 2'-O-methylcytidine-3'-phosphorothioate
  modified_base 3: mod_base = OTHER; note = 2'-O-methyluridine-3'-phosphate
  modified_base 4: mod_base = OTHER; note = 2'-O-methyladenosine-3'-phosphate
  modified_base 5: mod_base = OTHER; note = 2'-O-methyluridine-3'-phosphate
  modified_base 6: mod_base = OTHER; note = 2'-O-methylguanosine-3'-phosphate
  modified_base 7: mod_base = OTHER; note = 2'-fluorouridine-3'-phosphate
  modified_base 8: mod_base = OTHER; note = 2'-O-methyluridine-3'-phosphate
  modified_base 9: mod_base = OTHER; note = 2'-fluorocytidine-3'-phosphate
  modified_base 10: mod_base = OTHER; note = 2'-fluorocytidine-3'-phosphate
  modified_base 11: mod_base = OTHER; note = 2'-fluorocytidine-3'-phosphate
  modified_base 12: mod_base = OTHER; note = 2'-O-methyluridine-3'-phosphate
  modified_base 13: mod_base = OTHER; note = 2'-O-methylguanosine-3'-phosphate
  modified_base 14: mod_base = OTHER; note = 2'-O-methyladenosine-3'-phosphate
  modified_base 15: mod_base = OTHER; note = 2'-O-methylguanosine-3'-phosphate
  modified_base 16: mod_base = OTHER; note = 2'-O-methyladenosine-3'-phosphate
  modified_base 17: mod_base = OTHER; note = 2'-O-methylcytidine-3'-phosphate
  modified_base 18: mod_base = OTHER; note = 2'-O-methyladenosine-3'-phosphate
  modified_base 19: mod_base = OTHER; note = 2'-O-methyluridine-3'-phosphorothioate
  modified_base 20: mod_base = OTHER; note = 2'-O-methyluridine-3'-phosphorothioate
  modified_base 21: mod_base = OTHER; note = 2'-O-methyladenosine-3'-phosphate
gctatgttccctgagacatta

SEQ ID NO: 901 - RNA, 21 nt, synthetic construct
  source 1..21: mol_type = other RNA
  modified_base 1: mod_base = OTHER; note = 2'-O-methyladenosine-3'-phosphorothioate
  modified_base 2: mod_base = OTHER; note = 2'-O-methylguanosine-3'-phosphorothioate
  modified_base 3: mod_base = OTHER; note = 2'-O-methylcytidine-3'-phosphate
  modified_base 4: mod_base = OTHER; note = 2'-O-methylguanosine-3'-phosphate
  modified_base 5: mod_base = OTHER; note = 2'-O-methyluridine-3'-phosphate
  modified_base 6: mod_base = OTHER; note = 2'-O-methyluridine-3'-phosphate
  modified_base 7: mod_base = OTHER; note = 2'-fluorouridine-3'-phosphate
  modified_base 8: mod_base = OTHER; note = 2'-O-methylguanosine-3'-phosphate
  modified_base 9: mod_base = OTHER; note = 2'-fluoroguanosine-3'-phosphate
  modified_base 10: mod_base = OTHER; note = 2'-fluorocytidine-3'-phosphate
  modified_base 11: mod_base = OTHER; note = 2'-fluorouridine-3'-phosphate
  modified_base 12: mod_base = OTHER; note = 2'-O-methylguanosine-3'-phosphate
  modified_base 13: mod_base = OTHER; note = 2'-O-methyladenosine-3'-phosphate
  modified_base 14: mod_base = OTHER; note = 2'-O-methyladenosine-3'-phosphate
  modified_base 15: mod_base = OTHER; note = 2'-O-methylcytidine-3'-phosphate
  modified_base 16: mod_base = OTHER; note = 2'-O-methylcytidine-3'-phosphate
  modified_base 17: mod_base = OTHER; note = 2'-O-methyladenosine-3'-phosphate
  modified_base 18: mod_base = OTHER; note = 2'-O-methyluridine-3'-phosphate
  modified_base 19: mod_base = OTHER; note = 2'-O-methylcytidine-3'-phosphorothioate
  modified_base 20: mod_base = OTHER; note = 2'-O-methyladenosine-3'-phosphorothioate
  modified_base 21: mod_base = OTHER; note = 2'-O-methyladenosine-3'-phosphate
agcgtttggctgaaccatcaa

SEQ ID NO: 902 - RNA, 21 nt, synthetic construct
  source 1..21: mol_type = other RNA
  modified_base 1: mod_base = OTHER; note = 2'-O-methyluridine-3'-phosphorothioate
  modified_base 2: mod_base = OTHER; note = 2'-O-methylguanosine-3'-phosphorothioate
  modified_base 3: mod_base = OTHER; note = 2'-O-methylcytidine-3'-phosphate
  modified_base 4: mod_base = OTHER; note = 2'-O-methyluridine-3'-phosphate
  modified_base 5: mod_base = OTHER; note = 2'-O-methylguanosine-3'-phosphate
  modified_base 6: mod_base = OTHER; note = 2'-O-methyladenosine-3'-phosphate
  modified_base 7: mod_base = OTHER; note = 2'-fluoroadenosine-3'-phosphate
  modified_base 8: mod_base = OTHER; note = 2'-O-methyladenosine-3'-phosphate
  modified_base 9: mod_base = OTHER; note = 2'-fluorocytidine-3'-phosphate
  modified_base 10: mod_base = OTHER; note = 2'-fluoroadenosine-3'-phosphate
  modified_base 11: mod_base = OTHER; note = 2'-fluorouridine-3'-phosphate
  modified_base 12: mod_base = OTHER; note = 2'-O-methylguanosine-3'-phosphate
  modified_base 13: mod_base = OTHER; note = 2'-O-methylcytidine-3'-phosphate
  modified_base 14: mod_base = OTHER; note = 2'-O-methyladenosine-3'-phosphate
  modified_base 15: mod_base = OTHER; note = 2'-O-methylguanosine-3'-phosphate
  modified_base 16: mod_base = OTHER; note = 2'-O-methyluridine-3'-phosphate
  modified_base 17: mod_base = OTHER; note = 2'-O-methyluridine-3'-phosphate
  modified_base 18: mod_base = OTHER; note = 2'-O-methylguanosine-3'-phosphate
  modified_base 19: mod_base = OTHER; note = 2'-O-methyluridine-3'-phosphorothioate
  modified_base 20: mod_base = OTHER; note = 2'-O-methyladenosine-3'-phosphorothioate
  modified_base 21: mod_base = OTHER; note = 2'-O-methyladenosine-3'-phosphate
tgctgaaacatgcagttgtaa

SEQ ID NO: 903 - RNA, 21 nt, synthetic construct
  source 1..21: mol_type = other RNA
  modified_base 1: mod_base = OTHER; note = 2'-O-methylcytidine-3'-phosphorothioate
  modified_base 2: mod_base = OTHER; note = 2'-O-methyladenosine-3'-phosphorothioate
  modified_base 3: mod_base = OTHER; note = 2'-O-methyluridine-3'-phosphate
  modified_base 4: mod_base = OTHER; note = 2'-O-methylguanosine-3'-phosphate
  modified_base 5: mod_base = OTHER; note = 2'-O-methylcytidine-3'-phosphate
  modified_base 6: mod_base = OTHER; note = 2'-O-methyladenosine-3'-phosphate
  modified_base 7: mod_base = OTHER; note = 2'-fluoroguanosine-3'-phosphate
  modified_base 8: mod_base = OTHER; note = 2'-O-methyluridine-3'-phosphate
  modified_base 9: mod_base = OTHER; note = 2'-fluorouridine-3'-phosphate
  modified_base 10: mod_base = OTHER; note = 2'-fluoroguanosine-3'-phosphate
  modified_base 11: mod_base = OTHER; note = 2'-fluorouridine-3'-phosphate
  modified_base 12: mod_base = OTHER; note = 2'-O-methyladenosine-3'-phosphate
  modified_base 13: mod_base = OTHER; note = 2'-O-methyladenosine-3'-phosphate
  modified_base 14: mod_base = OTHER; note = 2'-O-methyladenosine-3'-phosphate
  modified_base 15: mod_base = OTHER; note = 2'-O-methylcytidine-3'-phosphate
  modified_base 16: mod_base = OTHER; note = 2'-O-methyluridine-3'-phosphate
  modified_base 17: mod_base = OTHER; note = 2'-O-methyluridine-3'-phosphate
  modified_base 18: mod_base = OTHER; note = 2'-O-methylguanosine-3'-phosphate
  modified_base 19: mod_base = OTHER; note = 2'-O-methyladenosine-3'-phosphorothioate
  modified_base 20: mod_base = OTHER; note = 2'-O-methyluridine-3'-phosphorothioate
  modified_base 21: mod_base = OTHER; note = 2'-O-methyladenosine-3'-phosphate
catgcagttgtaaacttgata

SEQ ID NO: 904 - RNA, 21 nt, synthetic construct
  source 1..21: mol_type = other RNA
  modified_base 1: mod_base = OTHER; note = 2'-O-methylguanosine-3'-phosphorothioate
  modified_base 2: mod_base = OTHER; note = 2'-O-methylcytidine-3'-phosphorothioate
  modified_base 3: mod_base = OTHER; note = 2'-O-methyladenosine-3'-phosphate
  modified_base 4: mod_base = OTHER; note = 2'-O-methylguanosine-3'-phosphate
  modified_base 5: mod_base = OTHER; note = 2'-O-methyluridine-3'-phosphate
  modified_base 6: mod_base = OTHER; note = 2'-O-methyluridine-3'-phosphate
  modified_base 7: mod_base = OTHER; note = 2'-fluoroguanosine-3'-phosphate
  modified_base 8: mod_base = OTHER; note = 2'-O-methyluridine-3'-phosphate
  modified_base 9: mod_base = OTHER; note = 2'-fluoroadenosine-3'-phosphate
  modified_base 10: mod_base = OTHER; note = 2'-fluoroadenosine-3'-phosphate
  modified_base 11: mod_base = OTHER; note = 2'-fluoroadenosine-3'-phosphate
  modified_base 12: mod_base = OTHER; note = 2'-O-methylcytidine-3'-phosphate
  modified_base 13: mod_base = OTHER; note = 2'-O-methyluridine-3'-phosphate
  modified_base 14: mod_base = OTHER; note = 2'-O-methyluridine-3'-phosphate
  modified_base 15: mod_base = OTHER; note = 2'-O-methylguanosine-3'-phosphate
  modified_base 16: mod_base = OTHER; note = 2'-O-methyladenosine-3'-phosphate
  modified_base 17: mod_base = OTHER; note = 2'-O-methyluridine-3'-phosphate
  modified_base 18: mod_base = OTHER; note = 2'-O-methyluridine-3'-phosphate
  modified_base 19: mod_base = OTHER; note = 2'-O-methyladenosine-3'-phosphorothioate
  modified_base 20: mod_base = OTHER; note = 2'-O-methyladenosine-3'-phosphorothioate
  modified_base 21: mod_base = OTHER; note = 2'-O-methyladenosine-3'-phosphate
gcagttgtaaacttgattaaa

SEQ ID NO: 905 - RNA, 21 nt, synthetic construct
  source 1..21: mol_type = other RNA
  modified_base 1: mod_base = OTHER; note = 2'-O-methyluridine-3'-phosphorothioate
  modified_base 2: mod_base = OTHER; note = 2'-O-methylguanosine-3'-phosphorothioate
  modified_base 3: mod_base = OTHER; note = 2'-O-methyladenosine-3'-phosphate
  modified_base 4: mod_base = OTHER; note = 2'-O-methyluridine-3'-phosphate
  modified_base 5: mod_base = OTHER; note = 2'-O-methyluridine-3'-phosphate
  modified_base 6: mod_base = OTHER; note = 2'-O-methyladenosine-3'-phosphate
  modified_base 7: mod_base = OTHER; note = 2'-fluoroadenosine-3'-phosphate
  modified_base 8: mod_base = OTHER; note = 2'-O-methylcytidine-3'-phosphate
  modified_base 9: mod_base = OTHER; note = 2'-fluorouridine-3'-phosphate
  modified_base 10: mod_base = OTHER; note = 2'-fluoroadenosine-3'-phosphate
  modified_base 11: mod_base = OTHER; note = 2'-fluorouridine-3'-phosphate
  modified_base 12: mod_base = OTHER; note = 2'-O-methylcytidine-3'-phosphate
  modified_base 13: mod_base = OTHER; note = 2'-O-methyladenosine-3'-phosphate
  modified_base 14: mod_base = OTHER; note = 2'-O-methyladenosine-3'-phosphate
  modified_base 15: mod_base = OTHER; note = 2'-O-methylguanosine-3'-phosphate
  modified_base 16: mod_base = OTHER; note = 2'-O-methyladenosine-3'-phosphate
  modified_base 17: mod_base = OTHER; note = 2'-O-methyluridine-3'-phosphate
  modified_base 18: mod_base = OTHER; note = 2'-O-methylguanosine-3'-phosphate
  modified_base 19: mod_base = OTHER; note = 2'-O-methyladenosine-3'-phosphorothioate
  modified_base 20: mod_base = OTHER; note = 2'-O-methyluridine-3'-phosphorothioate
  modified_base 21: mod_base = OTHER; note = 2'-O-methyladenosine-3'-phosphate
tgattaactatcaagatgata

SEQ ID NO: 906 - RNA, 21 nt, synthetic construct
  source 1..21: mol_type = other RNA
  modified_base 1: mod_base = OTHER; note = 2'-O-methylcytidine-3'-phosphorothioate
  modified_base 2: mod_base = OTHER; note = 2'-O-methyladenosine-3'-phosphorothioate
  modified_base 3: mod_base = OTHER; note = 2'-O-methylguanosine-3'-phosphate
  modified_base 4: mod_base = OTHER; note = 2'-O-methyladenosine-3'-phosphate
  modified_base 5: mod_base = OTHER; note = 2'-O-methyladenosine-3'-phosphate
  modified_base 6: mod_base = OTHER; note = 2'-O-methylcytidine-3'-phosphate
  modified_base 7: mod_base = OTHER; note = 2'-fluorouridine-3'-phosphate
  modified_base 8: mod_base = OTHER; note = 2'-O-methyluridine-3'-phosphate
  modified_base 9: mod_base = OTHER; note = 2'-fluoroguanosine-3'-phosphate
  modified_base 10: mod_base = OTHER; note = 2'-fluorocytidine-3'-phosphate
  modified_base 11: mod_base = OTHER; note = 2'-fluorocytidine-3'-phosphate
  modified_base 12: mod_base = OTHER; note = 2'-O-methyladenosine-3'-phosphate
  modified_base 13: mod_base = OTHER; note = 2'-O-methylcytidine-3'-phosphate
  modified_base 14: mod_base = OTHER; note = 2'-O-methyladenosine-3'-phosphate
  modified_base 15: mod_base = OTHER; note = 2'-O-methylcytidine-3'-phosphate
  modified_base 16: mod_base = OTHER; note = 2'-O-methylguanosine-3'-phosphate
  modified_base 17: mod_base = OTHER; note = 2'-O-methyluridine-3'-phosphate
  modified_base 18: mod_base = OTHER; note = 2'-O-methylguanosine-3'-phosphate
  modified_base 19: mod_base = OTHER; note = 2'-O-methylcytidine-3'-phosphorothioate
  modified_base 20: mod_base = OTHER; note = 2'-O-methyladenosine-3'-phosphorothioate
  modified_base 21: mod_base = OTHER; note = 2'-O-methyladenosine-3'-phosphate
cagaacttgccacacgtgcaa

SEQ ID NO: 907 - RNA, 21 nt, synthetic construct
  source 1..21: mol_type = other RNA
  modified_base 1: mod_base = OTHER; note = 2'-O-methylcytidine-3'-phosphorothioate
  modified_base 2: mod_base = OTHER; note = 2'-O-methyladenosine-3'-phosphorothioate
  modified_base 3: mod_base = OTHER; note = 2'-O-methylcytidine-3'-phosphate
  modified_base 4: mod_base = OTHER; note = 2'-O-methyladenosine-3'-phosphate
  modified_base 5: mod_base = OTHER; note = 2'-O-methylcytidine-3'-phosphate
  modified_base 6: mod_base = OTHER; note = 2'-O-methylguanosine-3'-phosphate
  modified_base 7: mod_base = OTHER; note = 2'-fluorouridine-3'-phosphate
  modified_base 8: mod_base = OTHER; note = 2'-O-methylguanosine-3'-phosphate
  modified_base 9: mod_base = OTHER; note = 2'-fluorocytidine-3'-phosphate
  modified_base 10: mod_base = OTHER; note = 2'-fluoroadenosine-3'-phosphate
  modified_base 11: mod_base = OTHER; note = 2'-fluoroadenosine-3'-phosphate
  modified_base 12: mod_base = OTHER; note = 2'-O-methyluridine-3'-phosphate
  modified_base 13: mod_base = OTHER; note = 2'-O-methylcytidine-3'-phosphate
  modified_base 14: mod_base = OTHER; note = 2'-O-methylcytidine-3'-phosphate
  modified_base 15: mod_base = OTHER; note = 2'-O-methylcytidine-3'-phosphate
  modified_base 16: mod_base = OTHER; note = 2'-O-methyluridine-3'-phosphate
  modified_base 17: mod_base = OTHER; note = 2'-O-methylguanosine-3'-phosphate
  modified_base 18: mod_base = OTHER; note = 2'-O-methyladenosine-3'-phosphate
  modified_base 19: mod_base = OTHER; note = 2'-O-methyladenosine-3'-phosphorothioate
  modified_base 20: mod_base = OTHER; note = 2'-O-methylcytidine-3'-phosphorothioate
  modified_base 21: mod_base = OTHER; note = 2'-O-methyladenosine-3'-phosphate
cacacgtgcaatccctgaaca

SEQ ID NO: 908 - RNA, 21 nt, synthetic construct
  source 1..21: mol_type = other RNA
  modified_base 1: mod_base = OTHER; note = 2'-O-methylguanosine-3'-phosphorothioate
  modified_base 2: mod_base = OTHER; note = 2'-O-methyluridine-3'-phosphorothioate
  modified_base 3: mod_base = OTHER; note = 2'-O-methylguanosine-3'-phosphate
  modified_base 4: mod_base = OTHER; note = 2'-O-methylcytidine-3'-phosphate
  modified_base 5: mod_base = OTHER; note = 2'-O-methyladenosine-3'-phosphate
  modified_base 6: mod_base = OTHER; note = 2'-O-methyladenosine-3'-phosphate
  modified_base 7: mod_base = OTHER; note = 2'-fluorouridine-3'-phosphate
  modified_base 8: mod_base = OTHER; note = 2'-O-methylcytidine-3'-phosphate
  modified_base 9: mod_base = OTHER; note = 2'-fluorocytidine-3'-phosphate
  modified_base 10: mod_base = OTHER; note = 2'-fluorocytidine-3'-phosphate
  modified_base 11: mod_base = OTHER; note = 2'-fluorouridine-3'-phosphate
  modified_base 12: mod_base = OTHER; note = 2'-O-methylguanosine-3'-phosphate
  modified_base 13: mod_base = OTHER; note = 2'-O-methyladenosine-3'-phosphate
  modified_base 14: mod_base = OTHER; note = 2'-O-methyladenosine-3'-phosphate
  modified_base 15: mod_base = OTHER; note = 2'-O-methylcytidine-3'-phosphate
  modified_base 16: mod_base = OTHER; note = 2'-O-methyluridine-3'-phosphate
  modified_base 17: mod_base = OTHER; note = 2'-O-methylguanosine-3'-phosphate
  modified_base 18: mod_base = OTHER; note = 2'-O-methyladenosine-3'-phosphate
  modified_base 19: mod_base = OTHER; note = 2'-O-methylcytidine-3'-phosphorothioate
  modified_base 20: mod_base = OTHER; note = 2'-O-methyladenosine-3'-phosphorothioate
  modified_base 21: mod_base = OTHER; note = 2'-O-methyladenosine-3'-phosphate
gtgcaatccctgaactgacaa

SEQ ID NO: 909 - RNA, 21 nt, synthetic construct
  source 1..21: mol_type = other RNA
  modified_base 1: mod_base = OTHER; note = 2'-O-methylguanosine-3'-phosphorothioate
  modified_base 2: mod_base = OTHER; note = 2'-O-methyladenosine-3'-phosphorothioate
  modified_base 3: mod_base = OTHER; note = 2'-O-methylguanosine-3'-phosphate
  modified_base 4: mod_base = OTHER; note = 2'-O-methylguanosine-3'-phosphate
  modified_base 5: mod_base = OTHER; note = 2'-O-methyladenosine-3'-phosphate
  modified_base 6: mod_base = OTHER; note = 2'-O-methylcytidine-3'-phosphate
  modified_base 7: mod_base = OTHER; note = 2'-fluorocytidine-3'-phosphate
  modified_base 8: mod_base = OTHER; note = 2'-O-methyladenosine-3'-phosphate
  modified_base 9: mod_base = OTHER; note = 2'-fluoroguanosine-3'-phosphate
  modified_base 10: mod_base = OTHER; note = 2'-fluoroguanosine-3'-phosphate
  modified_base 11: mod_base = OTHER; note = 2'-fluorouridine-3'-phosphate
  modified_base 12: mod_base = OTHER; note = 2'-O-methylguanosine-3'-phosphate
  modified_base 13: mod_base = OTHER; note = 2'-O-methylguanosine-3'-phosphate
  modified_base 14: mod_base = OTHER; note = 2'-O-methyluridine-3'-phosphate
  modified_base 15: mod_base = OTHER; note = 2'-O-methylguanosine-3'-phosphate
  modified_base 16: mod_base = OTHER; note = 2'-O-methylguanosine-3'-phosphate
  modified_base 17: mod_base = OTHER; note = 2'-O-methyluridine-3'-phosphate
  modified_base 18: mod_base = OTHER; note = 2'-O-methyluridine-3'-phosphate
  modified_base 19: mod_base = OTHER; note = 2'-O-methyladenosine-3'-phosphorothioate
  modified_base 20: mod_base = OTHER; note = 2'-O-methyladenosine-3'-phosphorothioate
  modified_base 21: mod_base = OTHER; note = 2'-O-methyladenosine-3'-phosphate
gaggaccaggtggtggttaaa

SEQ ID NO: 910 - RNA, 21 nt, synthetic construct
  source 1..21: mol_type = other RNA
  modified_base 1: mod_base = OTHER; note = 2'-O-methylguanosine-3'-phosphorothioate
  modified_base 2: mod_base = OTHER; note = 2'-O-methyluridine-3'-phosphorothioate
  modified_base 3: mod_base = OTHER; note = 2'-O-methylguanosine-3'-phosphate
  modified_base 4: mod_base = OTHER; note = 2'-O-methylguanosine-3'-phosphate
  modified_base 5: mod_base = OTHER; note = 2'-O-methyluridine-3'-phosphate
  modified_base 6: mod_base = OTHER; note = 2'-O-methylguanosine-3'-phosphate
  modified_base 7: mod_base = OTHER; note = 2'-fluoroguanosine-3'-phosphate
  modified_base 8: mod_base = OTHER; note = 2'-O-methyluridine-3'-phosphate
  modified_base 9: mod_base = OTHER; note = 2'-fluorouridine-3'-phosphate
  modified_base 10: mod_base = OTHER; note = 2'-fluoroadenosine-3'-phosphate
  modified_base 11: mod_base = OTHER; note = 2'-fluoroadenosine-3'-phosphate
  modified_base 12: mod_base = OTHER; note = 2'-O-methyluridine-3'-phosphate
  modified_base 13: mod_base = OTHER; note = 2'-O-methyladenosine-3'-phosphate
  modified_base 14: mod_base = OTHER; note = 2'-O-methyladenosine-3'-phosphate
  modified_base 15: mod_base = OTHER; note = 2'-O-methylguanosine-3'-phosphate
  modified_base 16: mod_base = OTHER; note = 2'-O-methylguanosine-3'-phosphate
  modified_base 17: mod_base = OTHER; note = 2'-O-methylcytidine-3'-phosphate
  modified_base 18: mod_base = OTHER; note = 2'-O-methyluridine-3'-phosphate
  modified_base 19: mod_base = OTHER; note = 2'-O-methylguanosine-3'-phosphorothioate
  modified_base 20: mod_base = OTHER; note = 2'-O-methylcytidine-3'-phosphorothioate
  modified_base 21: mod_base = OTHER; note = 2'-O-methyladenosine-3'-phosphate
gtggtggttaataaggctgca

SEQ ID NO: 911 - RNA, 21 nt, synthetic construct
  source 1..21: mol_type = other RNA
  modified_base 1: mod_base = OTHER; note = 2'-O-methyluridine-3'-phosphorothioate
  modified_base 2: mod_base = OTHER; note = 2'-O-methylguanosine-3'-phosphorothioate
  modified_base 3: mod_base = OTHER; note = 2'-O-methylcytidine-3'-phosphate
  modified_base 4: mod_base = OTHER; note = 2'-O-methyladenosine-3'-phosphate
  modified_base 5: mod_base = OTHER; note = 2'-O-methylguanosine-3'-phosphate
  modified_base 6: mod_base = OTHER; note = 2'-O-methyladenosine-3'-phosphate
  modified_base 7: mod_base = OTHER; note = 2'-fluoroadenosine-3'-phosphate
  modified_base 8: mod_base = OTHER; note = 2'-O-methyluridine-3'-phosphate
  modified_base 9: mod_base = OTHER; note = 2'-fluoroadenosine-3'-phosphate
  modified_base 10: mod_base = OTHER; note = 2'-fluorocytidine-3'-phosphate
  modified_base 11: mod_base = OTHER; note = 2'-fluoroadenosine-3'-phosphate
  modified_base 12: mod_base = OTHER; note = 2'-O-methyladenosine-3'-phosphate
  modified_base 13: mod_base = OTHER; note = 2'-O-methyladenosine-3'-phosphate
  modified_base 14: mod_base = OTHER; note = 2'-O-methyluridine-3'-phosphate
  modified_base 15: mod_base = OTHER; note = 2'-O-methylguanosine-3'-phosphate
  modified_base 16: mod_base = OTHER; note = 2'-O-methyladenosine-3'-phosphate
  modified_base 17: mod_base = OTHER; note = 2'-O-methyluridine-3'-phosphate
  modified_base 18: mod_base = OTHER; note = 2'-O-methylguanosine-3'-phosphate
  modified_base 19: mod_base = OTHER; note = 2'-O-methyluridine-3'-phosphorothioate
  modified_base 20: mod_base = OTHER; note = 2'-O-methyladenosine-3'-phosphorothioate
  modified_base 21: mod_base = OTHER; note = 2'-O-methyladenosine-3'-phosphate
tgcagaatacaaatgatgtaa

SEQ ID NO: 912 - RNA, 21 nt, synthetic construct
  source 1..21: mol_type = other RNA
  modified_base 1: mod_base = OTHER; note = 2'-O-methyladenosine-3'-phosphorothioate
  modified_base 2: mod_base = OTHER; note = 2'-O-methylguanosine-3'-phosphorothioate
  modified_base 3: mod_base = OTHER; note = 2'-O-methyladenosine-3'-phosphate
  modified_base 4: mod_base = OTHER; note = 2'-O-methyladenosine-3'-phosphate
  modified_base 5: mod_base = OTHER; note = 2'-O-methyluridine-3'-phosphate
  modified_base 6: mod_base = OTHER; note = 2'-O-methyladenosine-3'-phosphate
  modified_base 7: mod_base = OTHER; note = 2'-fluorocytidine-3'-phosphate
  modified_base 8: mod_base = OTHER; note = 2'-O-methyladenosine-3'-phosphate
  modified_base 9: mod_base = OTHER; note = 2'-fluoroadenosine-3'-phosphate
  modified_base 10: mod_base = OTHER; note = 2'-fluoroadenosine-3'-phosphate
  modified_base 11: mod_base = OTHER; note = 2'-fluorouridine-3'-phosphate
  modified_base 12: mod_base = OTHER; note = 2'-O-methylguanosine-3'-phosphate
  modified_base 13: mod_base = OTHER; note = 2'-O-methyladenosine-3'-phosphate
  modified_base 14: mod_base = OTHER; note = 2'-O-methyluridine-3'-phosphate
  modified_base 15: mod_base = OTHER; note = 2'-O-methylguanosine-3'-phosphate
  modified_base 16: mod_base = OTHER; note = 2'-O-methyluridine-3'-phosphate
  modified_base 17: mod_base = OTHER; note = 2'-O-methyladenosine-3'-phosphate
  modified_base 18: mod_base = OTHER; note = 2'-O-methylguanosine-3'-phosphate
  modified_base 19: mod_base = OTHER; note = 2'-O-methyladenosine-3'-phosphorothioate
  modified_base 20: mod_base = OTHER; note = 2'-O-methyladenosine-3'-phosphorothioate
  modified_base 21: mod_base = OTHER; note = 2'-O-methyladenosine-3'-phosphate
agaatacaaatgatgtagaaa

SEQ ID NO: 913 - RNA, 21 nt, synthetic construct
  source 1..21: mol_type = other RNA
  modified_base 1: mod_base = OTHER; note = 2'-O-methyluridine-3'-phosphorothioate
  modified_base 2: mod_base = OTHER; note = 2'-O-methylguanosine-3'-phosphorothioate
  modified_base 3: mod_base = OTHER; note = 2'-O-methyladenosine-3'-phosphate
  modified_base 4: mod_base = OTHER; note = 2'-O-methyluridine-3'-phosphate
  modified_base 5: mod_base = OTHER; note = 2'-O-methylguanosine-3'-phosphate
  modified_base 6: mod_base = OTHER; note = 2'-O-methyluridine-3'-phosphate
  modified_base 7: mod_base = OTHER; note = 2'-fluoroadenosine-3'-phosphate
  modified_base 8: mod_base = OTHER; note = 2'-O-methylguanosine-3'-phosphate
  modified_base 9: mod_base = OTHER; note = 2'-fluoroadenosine-3'-phosphate
  modified_base 10: mod_base = OTHER; note = 2'-fluoroadenosine-3'-phosphate
  modified_base 11: mod_base = OTHER; note = 2'-fluoroadenosine-3'-phosphate
  modified_base 12: mod_base = OTHER; note = 2'-O-methylcytidine-3'-phosphate
  modified_base 13: mod_base = OTHER; note = 2'-O-methyladenosine-3'-phosphate
  modified_base 14: mod_base = OTHER; note = 2'-O-methylguanosine-3'-phosphate
  modified_base 15: mod_base = OTHER; note = 2'-O-methylcytidine-3'-phosphate
  modified_base 16: mod_base = OTHER; note = 2'-O-methyluridine-3'-phosphate
  modified_base 17: mod_base = OTHER; note = 2'-O-methylcytidine-3'-phosphate
  modified_base 18: mod_base = OTHER; note = 2'-O-methylguanosine-3'-phosphate
  modified_base 19: mod_base = OTHER; note = 2'-O-methyluridine-3'-phosphorothioate
  modified_base 20: mod_base = OTHER; note = 2'-O-methyluridine-3'-phosphorothioate
  modified_base 21: mod_base = OTHER; note = 2'-O-methyladenosine-3'-phosphate
tgatgtagaaacagctcgtta

SEQ ID NO: 914 - RNA, 21 nt, synthetic construct
  source 1..21: mol_type = other RNA
  modified_base 1: mod_base = OTHER; note = 2'-O-methylcytidine-3'-phosphorothioate
  modified_base 2: mod_base = OTHER; note = 2'-O-methyluridine-3'-phosphorothioate
  modified_base 3: mod_base = OTHER; note = 2'-O-methyluridine-3'-phosphate
  modified_base 4: mod_base = OTHER; note = 2'-O-methylguanosine-3'-phosphate
  modified_base 5: mod_base = OTHER; note = 2'-O-methylcytidine-3'-phosphate
  modified_base 6: mod_base = OTHER; note = 2'-O-methyladenosine-3'-phosphate
  modified_base 7: mod_base = OTHER; note = 2'-fluorouridine-3'-phosphate
  modified_base 8: mod_base = OTHER; note = 2'-O-methyladenosine-3'-phosphate
  modified_base 9: mod_base = OTHER; note = 2'-fluoroadenosine-3'-phosphate
  modified_base 10: mod_base = OTHER; note = 2'-fluorocytidine-3'-phosphate
  modified_base 11: mod_base = OTHER; note = 2'-fluorocytidine-3'-phosphate
  modified_base 12: mod_base = OTHER; note = 2'-O-methyluridine-3'-phosphate
  modified_base 13: mod_base = OTHER; note = 2'-O-methyluridine-3'-phosphate
  modified_base 14: mod_base = OTHER; note = 2'-O-methyluridine-3'-phosphate
  modified_base 15: mod_base = OTHER; note = 2'-O-methylcytidine-3'-phosphate
  modified_base 16: mod_base = OTHER; note = 2'-O-methylcytidine-3'-phosphate
  modified_base 17: mod_base = OTHER; note = 2'-O-methylcytidine-3'-phosphate
  modified_base 18: mod_base = OTHER; note = 2'-O-methyladenosine-3'-phosphate
  modified_base 19: mod_base = OTHER; note = 2'-O-methyluridine-3'-phosphorothioate
  modified_base 20: mod_base = OTHER; note = 2'-O-methylcytidine-3'-phosphorothioate
  modified_base 21: mod_base = OTHER; note = 2'-O-methyladenosine-3'-phosphate
cttgcataacctttcccatca

SEQ ID NO: 915 - RNA, 21 nt, synthetic construct
  source 1..21: mol_type = other RNA
  modified_base 1: mod_base = OTHER; note = 2'-O-methyluridine-3'-phosphorothioate
  modified_base 2: mod_base = OTHER; note = 2'-O-methyluridine-3'-phosphorothioate
  modified_base 3: mod_base = OTHER; note = 2'-O-methylguanosine-3'-phosphate
  modified_base 4: mod_base = OTHER; note = 2'-O-methylcytidine-3'-phosphate
  modified_base 5: mod_base = OTHER; note = 2'-O-methyladenosine-3'-phosphate
  modified_base 6: mod_base = OTHER; note = 2'-O-methyluridine-3'-phosphate
  modified_base 7: mod_base = OTHER; note = 2'-fluoroadenosine-3'-phosphate
  modified_base 8: mod_base = OTHER; note = 2'-O-methyladenosine-3'-phosphate
  modified_base 9: mod_base = OTHER; note = 2'-fluorocytidine-3'-phosphate
  modified_base 10: mod_base = OTHER; note = 2'-fluorocytidine-3'-phosphate
  modified_base 11: mod_base = OTHER; note = 2'-fluorouridine-3'-phosphate
  modified_base 12: mod_base = OTHER; note = 2'-O-methyluridine-3'-phosphate
  modified_base 13: mod_base = OTHER; note = 2'-O-methyluridine-3'-phosphate
  modified_base 14: mod_base = OTHER; note = 2'-O-methylcytidine-3'-phosphate
  modified_base 15: mod_base = OTHER; note = 2'-O-methylcytidine-3'-phosphate
  modified_base 16: mod_base = OTHER; note = 2'-O-methylcytidine-3'-phosphate
  modified_base 17: mod_base = OTHER; note = 2'-O-methyladenosine-3'-phosphate
  modified_base 18: mod_base = OTHER; note = 2'-O-methyluridine-3'-phosphate
  modified_base 19: mod_base = OTHER; note = 2'-O-methylcytidine-3'-phosphorothioate
  modified_base 20: mod_base = OTHER; note = 2'-O-methyladenosine-3'-phosphorothioate
  modified_base 21: mod_base = OTHER; note = 2'-O-methyladenosine-3'-phosphate
ttgcataacctttcccatcaa

SEQ ID NO: 916 - RNA, 21 nt, synthetic construct
  source 1..21: mol_type = other RNA
  modified_base 1: mod_base = OTHER; note = 2'-O-methylcytidine-3'-phosphorothioate
  modified_base 2: mod_base = OTHER; note = 2'-O-methylcytidine-3'-phosphorothioate
  modified_base 3: mod_base = OTHER; note = 2'-O-methyladenosine-3'-phosphate
  modified_base 4: mod_base = OTHER; note = 2'-O-methyluridine-3'-phosphate
  modified_base 5: mod_base = OTHER; note = 2'-O-methylcytidine-3'-phosphate
  modified_base 6: mod_base = OTHER; note = 2'-O-methyluridine-3'-phosphate
  modified_base 7: mod_base = OTHER; note = 2'-fluorouridine-3'-phosphate
  modified_base 8: mod_base = OTHER; note = 2'-O-methyluridine-3'-phosphate
  modified_base 9: mod_base = OTHER; note = 2'-fluoroadenosine-3'-phosphate
  modified_base 10: mod_base = OTHER; note = 2'-fluoroadenosine-3'-phosphate
  modified_base 11: mod_base = OTHER; note = 2'-fluoroguanosine-3'-phosphate
  modified_base 12: mod_base = OTHER; note = 2'-O-methyluridine-3'-phosphate
  modified_base 13: mod_base = OTHER; note = 2'-O-methylcytidine-3'-phosphate
  modified_base 14: mod_base = OTHER; note = 2'-O-methyluridine-3'-phosphate
  modified_base 15: mod_base = OTHER; note = 2'-O-methylguanosine-3'-phosphate
  modified_base 16: mod_base = OTHER; note = 2'-O-methylguanosine-3'-phosphate
  modified_base 17: mod_base = OTHER; note = 2'-O-methyladenosine-3'-phosphate
  modified_base 18: mod_base = OTHER; note = 2'-O-methylguanosine-3'-phosphate
  modified_base 19: mod_base = OTHER; note = 2'-O-methylguanosine-3'-phosphorothioate
  modified_base 20: mod_base = OTHER; note = 2'-O-methylcytidine-3'-phosphorothioate
  modified_base 21: mod_base = OTHER; note = 2'-O-methyladenosine-3'-phosphate
ccatctttaagtctggaggca

SEQ ID NO: 917 - RNA, 21 nt, synthetic construct
  source 1..21: mol_type = other RNA
  modified_base 1: mod_base = OTHER; note = 2'-O-methylguanosine-3'-phosphorothioate
  modified_base 2: mod_base = OTHER; note = 2'-O-methylcytidine-3'-phosphorothioate
  modified_base 3: mod_base = OTHER; note = 2'-O-methylcytidine-3'-phosphate
  modified_base 4: mod_base = OTHER; note = 2'-O-methyladenosine-3'-phosphate
  modified_base 5: mod_base = OTHER; note = 2'-O-methyluridine-3'-phosphate
  modified_base 6: mod_base = OTHER; note = 2'-O-methyluridine-3'-phosphate
  modified_base 7: mod_base = OTHER; note = 2'-fluoroadenosine-3'-phosphate
  modified_base 8: mod_base = OTHER; note = 2'-O-methylcytidine-3'-phosphate
  modified_base 9: mod_base = OTHER; note = 2'-fluoroadenosine-3'-phosphate
  modified_base 10: mod_base = OTHER; note = 2'-fluoroadenosine-3'-phosphate
  modified_base 11: mod_base = OTHER; note = 2'-fluorocytidine-3'-phosphate
  modified_base 12: mod_base = OTHER; note = 2'-O-methyluridine-3'-phosphate
  modified_base 13: mod_base = OTHER; note = 2'-O-methylcytidine-3'-phosphate
  modified_base 14: mod_base = OTHER; note = 2'-O-methyluridine-3'-phosphate
  modified_base 15: mod_base = OTHER; note = 2'-O-methylcytidine-3'-phosphate
  modified_base 16: mod_base = OTHER; note = 2'-O-methylcytidine-3'-phosphate
  modified_base 17: mod_base = OTHER; note = 2'-O-methyladenosine-3'-phosphate
  modified_base 18: mod_base = OTHER; note = 2'-O-methylcytidine-3'-phosphate
  modified_base 19: mod_base = OTHER; note = 2'-O-methyladenosine-3'-phosphorothioate
  modified_base 20: mod_base = OTHER; note = 2'-O-methyladenosine-3'-phosphorothioate
  modified_base 21: mod_base = OTHER; note = 2'-O-methyladenosine-3'-phosphate
gccattacaactctccacaaa

SEQ ID NO: 918 - RNA, 21 nt, synthetic construct
  source 1..21: mol_type = other RNA
  modified_base 1: mod_base = OTHER; note = 2'-O-methylguanosine-3'-phosphorothioate
  modified_base 2: mod_base = OTHER; note = 2'-O-methyluridine-3'-phosphorothioate
  modified_base 3: mod_base = OTHER; note = 2'-O-methyluridine-3'-phosphate
  modified_base 4: mod_base = OTHER; note = 2'-O-methylguanosine-3'-phosphate
  modified_base 5: mod_base = OTHER; note = 2'-O-methylcytidine-3'-phosphate
  modified_base 6: mod_base = OTHER; note = 2'-O-methylcytidine-3'-phosphate
  modified_base 7: mod_base = OTHER; note = 2'-fluorouridine-3'-phosphate
  modified_base 8: mod_base = OTHER; note = 2'-O-methyluridine-3'-phosphate
  modified_base 9: mod_base = OTHER; note = 2'-fluoroguanosine-3'-phosphate
  modified_base 10: mod_base = OTHER; note = 2'-fluorocytidine-3'-phosphate
  modified_base 11: mod_base = OTHER; note = 2'-fluorouridine-3'-phosphate
  modified_base 12: mod_base = OTHER; note = 2'-O-methylcytidine-3'-phosphate
  modified_base 13: mod_base = OTHER; note = 2'-O-methyladenosine-3'-phosphate
  modified_base 14: mod_base = OTHER; note = 2'-O-methyladenosine-3'-phosphate
  modified_base 15: mod_base = OTHER; note = 2'-O-methylcytidine-3'-phosphate
  modified_base 16: mod_base = OTHER; note = 2'-O-methyladenosine-3'-phosphate
  modified_base 17: mod_base = OTHER; note = 2'-O-methyladenosine-3'-phosphate
  modified_base 18: mod_base = OTHER; note = 2'-O-methyladenosine-3'-phosphate
  modified_base 19: mod_base = OTHER; note = 2'-O-methyladenosine-3'-phosphorothioate
  modified_base 20: mod_base = OTHER; note = 2'-O-methylcytidine-3'-phosphorothioate
  modified_base 21: mod_base = OTHER; note = 2'-O-methyladenosine-3'-phosphate
gttgccttgctcaacaaaaca

SEQ ID NO: 919 - RNA, 21 nt, synthetic construct
  source 1..21: mol_type = other RNA
  modified_base 1: mod_base = OTHER; note = 2'-O-methyladenosine-3'-phosphorothioate
  modified_base 2: mod_base = OTHER; note = 2'-O-methyluridine-3'-phosphorothioate
  modified_base 3: mod_base = OTHER; note = 2'-O-methyluridine-3'-phosphate
  modified_base 4: mod_base = OTHER; note = 2'-O-methylcytidine-3'-phosphate
  modified_base 5: mod_base = OTHER; note = 2'-O-methyluridine-3'-phosphate
  modified_base 6: mod_base = OTHER; note = 2'-O-methyluridine-3'-phosphate
  modified_base 7: mod_base = OTHER; note = 2'-fluoroguanosine-3'-phosphate
  modified_base 8: mod_base = OTHER; note = 2'-O-methylguanosine-3'-phosphate
  modified_base 9: mod_base = OTHER; note = 2'-fluorocytidine-3'-phosphate
  modified_base 10: mod_base = OTHER; note = 2'-fluorouridine-3'-phosphate
  modified_base 11: mod_base = OTHER; note = 2'-fluoroadenosine-3'-phosphate
  modified_base 12: mod_base = OTHER; note = 2'-O-methyluridine-3'-phosphate
  modified_base 13: mod_base = OTHER; note = 2'-O-methyluridine-3'-phosphate
  modified_base 14: mod_base = OTHER; note = 2'-O-methyladenosine-3'-phosphate
  modified_base 15: mod_base = OTHER; note = 2'-O-methylcytidine-3'-phosphate
  modified_base 16: mod_base = OTHER; note = 2'-O-methylguanosine-3'-phosphate
  modified_base 17: mod_base = OTHER; note = 2'-O-methyladenosine-3'-phosphate
  modified_base 18: mod_base = OTHER; note = 2'-O-methylcytidine-3'-phosphate
  modified_base 19: mod_base = OTHER; note = 2'-O-methyladenosine-3'-phosphorothioate
  modified_base 20: mod_base = OTHER; note = 2'-O-methylguanosine-3'-phosphorothioate
  modified_base 21: mod_base = OTHER; note = 2'-O-methyladenosine-3'-phosphate
attcttggctattacgacaga

SEQ ID NO: 920 - RNA, 21 nt, synthetic construct
  source 1..21: mol_type = other RNA
  modified_base 1: mod_base = OTHER; note = 2'-O-methyladenosine-3'-phosphorothioate
  modified_base 2: mod_base = OTHER; note = 2'-O-methyladenosine-3'-phosphorothioate
  modified_base 3: mod_base = OTHER; note = 2'-O-methyladenosine-3'-phosphate
  modified_base 4: mod_base = OTHER; note = 2'-O-methyluridine-3'-phosphate
  modified_base 5: mod_base = OTHER; note = 2'-O-methyladenosine-3'-phosphate
  modified_base 6: mod_base = OTHER; note = 2'-O-methyluridine-3'-phosphate
  modified_base 7: mod_base = OTHER; note = 2'-fluoroadenosine-3'-phosphate
  modified_base 8: mod_base = OTHER; note = 2'-O-methyladenosine-3'-phosphate
  modified_base 9: mod_base = OTHER; note = 2'-fluorouridine-3'-phosphate
  modified_base 10: mod_base = OTHER; note = 2'-fluoroguanosine-3'-phosphate
  modified_base 11: mod_base = OTHER; note = 2'-fluoroadenosine-3'-phosphate
  modified_base 12: mod_base = OTHER; note = 2'-O-methylguanosine-3'-phosphate
  modified_base 13: mod_base = OTHER; note = 2'-O-methylguanosine-3'-phosphate
  modified_base 14: mod_base = OTHER; note = 2'-O-methyladenosine-3'-phosphate
  modified_base 15: mod_base = OTHER; note = 2'-O-methylcytidine-3'-phosphate
  modified_base 16: mod_base = OTHER; note = 2'-O-methylcytidine-3'-phosphate
  modified_base 17: mod_base = OTHER; note = 2'-O-methyluridine-3'-phosphate
  modified_base 18: mod_base = OTHER; note = 2'-O-methyladenosine-3'-phosphate
  modified_base 19: mod_base = OTHER; note = 2'-O-methyluridine-3'-phosphorothioate
  modified_base 20: mod_base = OTHER; note = 2'-O-methyladenosine-3'-phosphorothioate
  modified_base 21: mod_base = OTHER; note = 2'-O-methyladenosine-3'-phosphate
aaatataatgaggacctataa

SEQ ID NO: 921 - RNA, 21 nt, synthetic construct
  source 1..21: mol_type = other RNA
  modified_base 1: mod_base = OTHER; note = 2'-O-methyladenosine-3'-phosphorothioate
  modified_base 2: mod_base = OTHER; note = 2'-O-methyladenosine-3'-phosphorothioate
  modified_base 3: mod_base = OTHER; note = 2'-O-methyluridine-3'-phosphate
  modified_base 4: mod_base = OTHER; note = 2'-O-methyladenosine-3'-phosphate
  modified_base 5: mod_base = OTHER; note = 2'-O-methyluridine-3'-phosphate
  modified_base 6: mod_base = OTHER; note = 2'-O-methyladenosine-3'-phosphate
  modified_base 7: mod_base = OTHER; note = 2'-fluoroadenosine-3'-phosphate
  modified_base 8: mod_base = OTHER; note = 2'-O-methyluridine-3'-phosphate
  modified_base 9: mod_base = OTHER; note = 2'-fluoroguanosine-3'-phosphate
  modified_base 10: mod_base = OTHER; note = 2'-fluoroadenosine-3'-phosphate
  modified_base 11: mod_base = OTHER; note = 2'-fluoroguanosine-3'-phosphate
  modified_base 12: mod_base = OTHER; note = 2'-O-methylguanosine-3'-phosphate
  modified_base 13: mod_base = OTHER; note = 2'-O-methyladenosine-3'-phosphate
  modified_base 14: mod_base = OTHER; note = 2'-O-methylcytidine-3'-phosphate
  modified_base 15: mod_base = OTHER; note = 2'-O-methylcytidine-3'-phosphate
  modified_base 16: mod_base = OTHER; note = 2'-O-methyluridine-3'-phosphate
  modified_base 17: mod_base = OTHER; note = 2'-O-methyladenosine-3'-phosphate
  modified_base 18: mod_base = OTHER; note = 2'-O-methyluridine-3'-phosphate
  modified_base 19: mod_base = OTHER; note = 2'-O-methyladenosine-3'-phosphorothioate
  modified_base 20: mod_base = OTHER; note = 2'-O-methylcytidine-3'-phosphorothioate
  modified_base 21: mod_base = OTHER; note = 2'-O-methyladenosine-3'-phosphate
aatataatgaggacctataca

SEQ ID NO: 922 - RNA, 21 nt, synthetic construct
  source 1..21: mol_type = other RNA
  modified_base 1: mod_base = OTHER; note = 2'-O-methylguanosine-3'-phosphorothioate
  modified_base 2: mod_base = OTHER; note = 2'-O-methylcytidine-3'-phosphorothioate
  modified_base 3: mod_base = OTHER; note = 2'-O-methyladenosine-3'-phosphate
  modified_base 4: mod_base = OTHER; note = 2'-O-methylguanosine-3'-phosphate
  modified_base 5: mod_base = OTHER; note = 2'-O-methyladenosine-3'-phosphate
  modified_base 6: mod_base = OTHER; note = 2'-O-methylguanosine-3'-phosphate
  modified_base 7: mod_base = OTHER; note = 2'-fluorouridine-3'-phosphate
  modified_base 8: mod_base = OTHER; note = 2'-O-methylguanosine-3'-phosphate
  modified_base 9: mod_base = OTHER; note = 2'-fluorocytidine-3'-phosphate
  modified_base 10: mod_base = OTHER; note = 2'-fluorouridine-3'-phosphate
  modified_base 11: mod_base = OTHER; note = 2'-fluoroguanosine-3'-phosphate
  modified_base 12: mod_base = OTHER; note = 2'-O-methyladenosine-3'-phosphate
  modified_base 13: mod_base = OTHER; note = 2'-O-methyladenosine-3'-phosphate
  modified_base 14: mod_base = OTHER; note = 2'-O-methylguanosine-3'-phosphate
  modified_base 15: mod_base = OTHER; note = 2'-O-methylguanosine-3'-phosphate
  modified_base 16: mod_base = OTHER; note = 2'-O-methyluridine-3'-phosphate
  modified_base 17: mod_base = OTHER; note = 2'-O-methylguanosine-3'-phosphate
  modified_base 18: mod_base = OTHER; note = 2'-O-methylcytidine-3'-phosphate
  modified_base 19: mod_base = OTHER; note = 2'-O-methyluridine-3'-phosphorothioate
  modified_base 20: mod_base = OTHER; note = 2'-O-methyladenosine-3'-phosphorothioate
  modified_base 21: mod_base = OTHER; note = 2'-O-methyladenosine-3'-phosphate
gcagagtgctgaaggtgctaa

SEQ ID NO: 923 - RNA, 21 nt, synthetic construct
  source 1..21: mol_type = other RNA
  modified_base 1: mod_base = OTHER; note = 2'-O-methyluridine-3'-phosphorothioate
  modified_base 2: mod_base = OTHER; note = 2'-O-methyluridine-3'-phosphorothioate
  modified_base 3: mod_base = OTHER; note = 2'-O-methylcytidine-3'-phosphate
  modified_base 4: mod_base = OTHER; note = 2'-O-methyluridine-3'-phosphate
  modified_base 5: mod_base = OTHER; note = 2'-O-methylguanosine-3'-phosphate
  modified_base 6: mod_base = OTHER; note = 2'-O-methylguanosine-3'-phosphate
  modified_base 7: mod_base = OTHER; note = 2'-fluoroguanosine-3'-phosphate
  modified_base 8: mod_base = OTHER; note = 2'-O-methyluridine-3'-phosphate
  modified_base 9: mod_base = OTHER; note = 2'-fluorouridine-3'-phosphate
  modified_base 10: mod_base = OTHER; note = 2'-fluorocytidine-3'-phosphate
  modified_base 11: mod_base = OTHER; note = 2'-fluoroadenosine-3'-phosphate
  modified_base 12: mod_base = OTHER; note = 2'-O-methylguanosine-3'-phosphate
  modified_base 13: mod_base = OTHER; note = 2'-O-methyladenosine-3'-phosphate
  modified_base 14: mod_base = OTHER; note = 2'-O-methyluridine-3'-phosphate
  modified_base 15: mod_base = OTHER; note = 2'-O-methylguanosine-3'-phosphate
  modified_base 16: mod_base = OTHER; note = 2'-O-methyladenosine-3'-phosphate
  modified_base 17: mod_base = OTHER; note = 2'-O-methyluridine-3'-phosphate
  modified_base 18: mod_base = OTHER; note = 2'-O-methyladenosine-3'-phosphate
  modified_base 19: mod_base = OTHER; note = 2'-O-methyluridine-3'-phosphorothioate
  modified_base 20: mod_base = OTHER; note = 2'-O-methyladenosine-3'-phosphorothioate
  modified_base 21: mod_base = OTHER; note = 2'-O-methyladenosine-3'-phosphate
ttctgggttcagatgatataa

SEQ ID NO: 924 - RNA, 21 nt, synthetic construct
  source 1..21: mol_type = other RNA
  modified_base 1: mod_base = OTHER; note = 2'-O-methylguanosine-3'-phosphorothioate
  modified_base 2: mod_base = OTHER; note = 2'-O-methyladenosine-3'-phosphorothioate
  modified_base 3: mod_base = OTHER; note = 2'-O-methyluridine-3'-phosphate
  modified_base 4: mod_base = OTHER; note = 2'-O-methylguanosine-3'-phosphate
  modified_base 5: mod_base = OTHER; note = 2'-O-methyladenosine-3'-phosphate
  modified_base 6: mod_base = OTHER; note = 2'-O-methyluridine-3'-phosphate
  modified_base 7: mod_base = OTHER; note = 2'-fluoroadenosine-3'-phosphate
  modified_base 8: mod_base = OTHER; note = 2'-O-methyluridine-3'-phosphate
  modified_base 9: mod_base = OTHER; note = 2'-fluoroadenosine-3'-phosphate
  modified_base 10: mod_base = OTHER; note = 2'-fluoroadenosine-3'-phosphate
  modified_base 11: mod_base = OTHER; note = 2'-fluoroadenosine-3'-phosphate
  modified_base 12: mod_base = OTHER; note = 2'-O-methyluridine-3'-phosphate
  modified_base 13: mod_base = OTHER; note = 2'-O-methylguanosine-3'-phosphate
  modified_base 14: mod_base = OTHER; note = 2'-O-methyluridine-3'-phosphate
  modified_base 15: mod_base = OTHER; note = 2'-O-methylguanosine-3'-phosphate
  modified_base 16: mod_base = OTHER; note = 2'-O-methylguanosine-3'-phosphate
  modified_base 17: mod_base = OTHER; note = 2'-O-methyluridine-3'-phosphate
  modified_base 18: mod_base = OTHER; note = 2'-O-methylcytidine-3'-phosphate
  modified_base 19: mod_base = OTHER; note = 2'-O-methyladenosine-3'-phosphorothioate
  modified_base 20: mod_base = OTHER; note = 2'-O-methylcytidine-3'-phosphorothioate
  modified_base 21: mod_base = OTHER; note = 2'-O-methyladenosine-3'-phosphate
gatgatataaatgtggtcaca

SEQ ID NO: 925 - RNA, 21 nt, synthetic construct
  source 1..21: mol_type = other RNA
  modified_base 1: mod_base = OTHER; note = 2'-O-methylguanosine-3'-phosphorothioate
  modified_base 2: mod_base = OTHER; note = 2'-O-methylguanosine-3'-phosphorothioate
  modified_base 3: mod_base = OTHER; note = 2'-O-methyladenosine-3'-phosphate
  modified_base 4: mod_base = OTHER; note = 2'-O-methyladenosine-3'-phosphate
  modified_base 5: mod_base = OTHER; note = 2'-O-methyluridine-3'-phosphate
  modified_base 6: mod_base = OTHER; note = 2'-O-methyluridine-3'-phosphate
  modified_base 7: mod_base = OTHER; note = 2'-fluorocytidine-3'-phosphate
  modified_base 8: mod_base = OTHER; note = 2'-O-methyluridine-3'-phosphate
  modified_base 9: mod_base = OTHER; note = 2'-fluorouridine-3'-phosphate
  modified_base 10: mod_base = OTHER; note = 2'-fluorouridine-3'-phosphate
  modified_base 11: mod_base = OTHER; note = 2'-fluorocytidine-3'-phosphate
  modified_base 12: mod_base = OTHER; note = 2'-O-methyluridine-3'-phosphate
  modified_base 13: mod_base = OTHER; note = 2'-O-methyladenosine-3'-phosphate
  modified_base 14: mod_base = OTHER; note = 2'-O-methyladenosine-3'-phosphate
  modified_base 15: mod_base = OTHER; note = 2'-O-methylcytidine-3'-phosphate
  modified_base 16: mod_base = OTHER; note = 2'-O-methylcytidine-3'-phosphate
  modified_base 17: mod_base = OTHER; note = 2'-O-methyluridine-3'-phosphate
  modified_base 18: mod_base = OTHER; note = 2'-O-methylcytidine-3'-phosphate
  modified_base 19: mod_base = OTHER; note = 2'-O-methyladenosine-3'-phosphorothioate
  modified_base 20: mod_base = OTHER; note = 2'-O-methylcytidine-3'-phosphorothioate
  modified_base 21: mod_base = OTHER; note = 2'-O-methyladenosine-3'-phosphate
ggaattctttctaacctcaca

SEQ ID NO: 926 - RNA, 21 nt, synthetic construct
  source 1..21: mol_type = other RNA
  modified_base 1: mod_base = OTHER; note = 2'-O-methyluridine-3'-phosphorothioate
  modified_base 2: mod_base = OTHER; note = 2'-O-methylcytidine-3'-phosphorothioate
  modified_base 3: mod_base = OTHER; note = 2'-O-methyluridine-3'-phosphate
  modified_base 4: mod_base = OTHER; note = 2'-O-methyluridine-3'-phosphate
  modified_base 5: mod_base = OTHER; note = 2'-O-methyluridine-3'-phosphate
  modified_base 6: mod_base = OTHER; note = 2'-O-methylcytidine-3'-phosphate
  modified_base 7: mod_base = OTHER; note = 2'-fluorouridine-3'-phosphate
  modified_base 8: mod_base = OTHER; note = 2'-O-methyladenosine-3'-phosphate
  modified_base 9: mod_base = OTHER; note = 2'-fluoroadenosine-3'-phosphate
  modified_base 10: mod_base = OTHER; note = 2'-fluorocytidine-3'-phosphate
  modified_base 11: mod_base = OTHER; note = 2'-fluorocytidine-3'-phosphate
  modified_base 12: mod_base = OTHER; note = 2'-O-methyluridine-3'-phosphate
  modified_base 13: mod_base = OTHER; note = 2'-O-methylcytidine-3'-phosphate
  modified_base 14: mod_base = OTHER; note = 2'-O-methyladenosine-3'-phosphate
  modified_base 15: mod_base = OTHER; note = 2'-O-methylcytidine-3'-phosphate
  modified_base 16: mod_base = OTHER; note = 2'-O-methyluridine-3'-phosphate
  modified_base 17: mod_base = OTHER; note = 2'-O-methyluridine-3'-phosphate
  modified_base 18: mod_base = OTHER; note = 2'-O-methylguanosine-3'-phosphate
  modified_base 19: mod_base = OTHER; note = 2'-O-methylcytidine-3'-phosphorothioate
  modified_base 20: mod_base = OTHER; note = 2'-O-methyladenosine-3'-phosphorothioate
  modified_base 21: mod_base = OTHER; note = 2'-O-methyladenosine-3'-phosphate
tctttctaacctcacttgcaa

SEQ ID NO: 927 - RNA, 21 nt, synthetic construct
  source 1..21: mol_type = other RNA
  modified_base 1: mod_base = OTHER; note = 2'-O-methyluridine-3'-phosphorothioate
  modified_base 2: mod_base = OTHER; note = 2'-O-methyluridine-3'-phosphorothioate
  modified_base 3: mod_base = OTHER; note = 2'-O-methylcytidine-3'-phosphate
  modified_base 4: mod_base = OTHER; note = 2'-O-methyluridine-3'-phosphate
  modified_base 5: mod_base = OTHER; note = 2'-O-methyladenosine-3'-phosphate
  modified_base 6: mod_base = OTHER; note = 2'-O-methyladenosine-3'-phosphate
  modified_base 7: mod_base = OTHER; note = 2'-fluorocytidine-3'-phosphate
  modified_base 8: mod_base = OTHER; note = 2'-O-methylcytidine-3'-phosphate
  modified_base 9: mod_base = OTHER; note = 2'-fluorouridine-3'-phosphate
  modified_base 10: mod_base = OTHER; note = 2'-fluorocytidine-3'-phosphate
  modified_base 11: mod_base = OTHER; note = 2'-fluoroadenosine-3'-phosphate
  modified_base 12: mod_base = OTHER; note = 2'-O-methylcytidine-3'-phosphate
  modified_base 13: mod_base = OTHER; note = 2'-O-methyluridine-3'-phosphate
  modified_base 14: mod_base = OTHER; note = 2'-O-methyluridine-3'-phosphate
  modified_base 15: mod_base = OTHER; note = 2'-O-methylguanosine-3'-phosphate
  modified_base 16: mod_base = OTHER; note = 2'-O-methylcytidine-3'-phosphate
  modified_base 17: mod_base = OTHER; note = 2'-O-methyladenosine-3'-phosphate
  modified_base 18: mod_base = OTHER; note = 2'-O-methyladenosine-3'-phosphate
  modified_base 19: mod_base = OTHER; note = 2'-O-methyluridine-3'-phosphorothioate
  modified_base 20: mod_base = OTHER; note = 2'-O-methyladenosine-3'-phosphorothioate
  modified_base 21: mod_base = OTHER; note = 2'-O-methyladenosine-3'-phosphate
ttctaacctcacttgcaataa

SEQ ID NO: 928 - RNA, 21 nt, synthetic construct
  source 1..21: mol_type = other RNA
  modified_base 1: mod_base = OTHER; note = 2'-O-methyluridine-3'-phosphorothioate
  modified_base 2: mod_base = OTHER; note = 2'-O-methylcytidine-3'-phosphorothioate
  modified_base 3: mod_base = OTHER; note = 2'-O-methyluridine-3'-phosphate
  modified_base 4: mod_base = OTHER; note = 2'-O-methyladenosine-3'-phosphate
  modified_base 5: mod_base = OTHER; note = 2'-O-methyladenosine-3'-phosphate
  modified_base 6: mod_base = OTHER; note = 2'-O-methylcytidine-3'-phosphate
  modified_base 7: mod_base = OTHER; note = 2'-fluorocytidine-3'-phosphate
  modified_base 8: mod_base = OTHER; note = 2'-O-methyluridine-3'-phosphate
  modified_base 9: mod_base = OTHER; note = 2'-fluorocytidine-3'-phosphate
  modified_base 10: mod_base = OTHER; note = 2'-fluoroadenosine-3'-phosphate
  modified_base 11: mod_base = OTHER; note = 2'-fluorocytidine-3'-phosphate
  modified_base 12: mod_base = OTHER; note = 2'-O-methyluridine-3'-phosphate
  modified_base 13: mod_base = OTHER; note = 2'-O-methyluridine-3'-phosphate
  modified_base 14: mod_base = OTHER; note = 2'-O-methylguanosine-3'-phosphate
  modified_base 15: mod_base = OTHER; note = 2'-O-methylcytidine-3'-phosphate
  modified_base 16: mod_base = OTHER; note = 2'-O-methyladenosine-3'-phosphate
  modified_base 17: mod_base = OTHER; note = 2'-O-methyladenosine-3'-phosphate
  modified_base 18: mod_base = OTHER; note = 2'-O-methyluridine-3'-phosphate
  modified_base 19: mod_base = OTHER; note = 2'-O-methyladenosine-3'-phosphorothioate
  modified_base 20: mod_base = OTHER; note = 2'-O-methyladenosine-3'-phosphorothioate
  modified_base 21: mod_base = OTHER; note = 2'-O-methyladenosine-3'-phosphate
tctaacctcacttgcaataaa

SEQ ID NO: 929 - RNA, 21 nt, synthetic construct
  source 1..21: mol_type = other RNA
  modified_base 1: mod_base = OTHER; note = 2'-O-methyladenosine-3'-phosphorothioate
  modified_base 2: mod_base = OTHER; note = 2'-O-methyladenosine-3'-phosphorothioate
  modified_base 3: mod_base = OTHER; note = 2'-O-methylguanosine-3'-phosphate
  modified_base 4: mod_base = OTHER; note = 2'-O-methyluridine-3'-phosphate
  modified_base 5: mod_base = OTHER; note = 2'-O-methylguanosine-3'-phosphate
  modified_base 6: mod_base = OTHER; note = 2'-O-methylguanosine-3'-phosphate
  modified_base 7: mod_base = OTHER; note = 2'-fluoroguanosine-3'-phosphate
  modified_base 8: mod_base = OTHER; note = 2'-O-methyluridine-3'-phosphate
  modified_base 9: mod_base = OTHER; note = 2'-fluoroguanosine-3'-phosphate
  modified_base 10: mod_base = OTHER; note = 2'-fluoroguanosine-3'-phosphate
  modified_base 11: mod_base = OTHER; note = 2'-fluorouridine-3'-phosphate
  modified_base 12: mod_base = OTHER; note = 2'-O-methyladenosine-3'-phosphate
  modified_base 13: mod_base = OTHER; note = 2'-O-methyluridine-3'-phosphate
  modified_base 14: mod_base = OTHER; note = 2'-O-methyladenosine-3'-phosphate
  modified_base 15: mod_base = OTHER; note = 2'-O-methylguanosine-3'-phosphate
  modified_base 16: mod_base = OTHER; note = 2'-O-methyladenosine-3'-phosphate
  modified_base 17: mod_base = OTHER; note = 2'-O-methylguanosine-3'-phosphate
  modified_base 18: mod_base = OTHER; note = 2'-O-methylguanosine-3'-phosphate
  modified_base 19: mod_base = OTHER; note = 2'-O-methylcytidine-3'-phosphorothioate
  modified_base 20: mod_base = OTHER; note = 2'-O-methyluridine-3'-phosphorothioate
  modified_base 21: mod_base = OTHER; note = 2'-O-methyladenosine-3'-phosphate
aagtgggtggtatagaggcta

SEQ ID NO: 930 - RNA, 21 nt, synthetic construct
  source 1..21: mol_type = other RNA
  modified_base 1: mod_base = OTHER; note = 2'-O-methyluridine-3'-phosphorothioate
  modified_base 2: mod_base = OTHER; note = 2'-O-methylguanosine-3'-phosphorothioate
  modified_base 3: mod_base = OTHER; note = 2'-O-methylguanosine-3'-phosphate
  modified_base 4: mod_base = OTHER; note = 2'-O-methylguanosine-3'-phosphate
  modified_base 5: mod_base = OTHER; note = 2'-O-methyluridine-3'-phosphate
  modified_base 6: mod_base = OTHER; note = 2'-O-methylguanosine-3'-phosphate
  modified_base 7: mod_base = OTHER; note = 2'-fluoroguanosine-3'-phosphate
  modified_base 8: mod_base = OTHER; note = 2'-O-methyluridine-3'-phosphate
  modified_base 9: mod_base = OTHER; note = 2'-fluoroadenosine-3'-phosphate
  modified_base 10: mod_base = OTHER; note = 2'-fluorouridine-3'-phosphate
  modified_base 11: mod_base = OTHER; note = 2'-fluoroadenosine-3'-phosphate
  modified_base 12: mod_base = OTHER; note = 2'-O-methylguanosine-3'-phosphate
  modified_base 13: mod_base = OTHER; note = 2'-O-methyladenosine-3'-phosphate
  modified_base 14: mod_base = OTHER; note = 2'-O-methylguanosine-3'-phosphate
  modified_base 15: mod_base = OTHER; note = 2'-O-methylguanosine-3'-phosphate
  modified_base 16: mod_base = OTHER; note = 2'-O-methylcytidine-3'-phosphate
  modified_base 17: mod_base = OTHER; note = 2'-O-methyluridine-3'-phosphate
  modified_base 18: mod_base = OTHER; note = 2'-O-methylcytidine-3'-phosphate
  modified_base 19: mod_base = OTHER; note = 2'-O-methyluridine-3'-phosphorothioate
  modified_base 20: mod_base = OTHER; note = 2'-O-methyluridine-3'-phosphorothioate
  modified_base 21: mod_base = OTHER; note = 2'-O-methyladenosine-3'-phosphate
tgggtggtatagaggctctta

SEQ ID NO: 931 - RNA, 21 nt, synthetic construct
  source 1..21: mol_type = other RNA
  modified_base 1: mod_base = OTHER; note = 2'-O-methyladenosine-3'-phosphorothioate
  modified_base 2: mod_base = OTHER; note = 2'-O-methylguanosine-3'-phosphorothioate
  modified_base 3: mod_base = OTHER; note = 2'-O-methylcytidine-3'-phosphate
  modified_base 4: mod_base = OTHER; note = 2'-O-methylcytidine-3'-phosphate
  modified_base 5: mod_base = OTHER; note = 2'-O-methyluridine-3'-phosphate
  modified_base 6: mod_base = OTHER; note = 2'-O-methylguanosine-3'-phosphate
  modified_base 7: mod_base = OTHER; note = 2'-fluorocytidine-3'-phosphate
  modified_base 8: mod_base = OTHER; note = 2'-O-methylcytidine-3'-phosphate
  modified_base 9: mod_base = OTHER; note = 2'-fluoroadenosine-3'-phosphate
  modified_base 10: mod_base = OTHER; note = 2'-fluorouridine-3'-phosphate
  modified_base 11: mod_base = OTHER; note = 2'-fluorocytidine-3'-phosphate
  modified_base 12: mod_base = OTHER; note = 2'-O-methyluridine-3'-phosphate
  modified_base 13: mod_base = OTHER; note = 2'-O-methylguanosine-3'-phosphate
  modified_base 14: mod_base = OTHER; note = 2'-O-methyluridine-3'-phosphate
  modified_base 15: mod_base = OTHER; note = 2'-O-methylguanosine-3'-phosphate
  modified_base 16: mod_base = OTHER; note = 2'-O-methylcytidine-3'-phosphate
  modified_base 17: mod_base = OTHER; note = 2'-O-methyluridine-3'-phosphate
  modified_base 18: mod_base = OTHER; note = 2'-O-methylcytidine-3'-phosphate
  modified_base 19: mod_base = OTHER; note = 2'-O-methyluridine-3'-phosphorothioate
  modified_base 20: mod_base = OTHER; note = 2'-O-methyluridine-3'-phosphorothioate
  modified_base 21: mod_base = OTHER; note = 2'-O-methyladenosine-3'-phosphate
agcctgccatctgtgctctta

SEQ ID NO: 932 - RNA, 21 nt, synthetic construct
  source 1..21: mol_type = other RNA
  modified_base 1: mod_base = OTHER; note = 2'-O-methylguanosine-3'-phosphorothioate
  modified_base 2: mod_base = OTHER; note = 2'-O-methylcytidine-3'-phosphorothioate
  modified_base 3: mod_base = OTHER; note = 2'-O-methylcytidine-3'-phosphate
  modified_base 4: mod_base = OTHER; note = 2'-O-methyluridine-3'-phosphate
  modified_base 5: mod_base = OTHER; note = 2'-O-methylguanosine-3'-phosphate
  modified_base 6: mod_base = OTHER; note = 2'-O-methylcytidine-3'-phosphate
  modified_base 7: mod_base = OTHER; note = 2'-fluorocytidine-3'-phosphate
  modified_base 8: mod_base = OTHER; note = 2'-O-methyladenosine-3'-phosphate
  modified_base 9: mod_base = OTHER; note = 2'-fluorouridine-3'-phosphate
  modified_base 10: mod_base = OTHER; note = 2'-fluorocytidine-3'-phosphate
  modified_base 11: mod_base = OTHER; note = 2'-fluorouridine-3'-phosphate
  modified_base 12: mod_base = OTHER; note = 2'-O-methylguanosine-3'-phosphate
  modified_base 13: mod_base = OTHER; note = 2'-O-methyluridine-3'-phosphate
  modified_base 14: mod_base = OTHER; note = 2'-O-methylguanosine-3'-phosphate
  modified_base 15: mod_base = OTHER; note = 2'-O-methylcytidine-3'-phosphate
  modified_base 16: mod_base = OTHER; note = 2'-O-methyluridine-3'-phosphate
  modified_base 17: mod_base = OTHER; note = 2'-O-methylcytidine-3'-phosphate
  modified_base 18: mod_base = OTHER; note = 2'-O-methyluridine-3'-phosphate
  modified_base 19: mod_base = OTHER; note = 2'-O-methyluridine-3'-phosphorothioate
  modified_base 20: mod_base = OTHER; note = 2'-O-methylcytidine-3'-phosphorothioate
  modified_base 21: mod_base = OTHER; note = 2'-O-methyladenosine-3'-phosphate
gcctgccatctgtgctcttca

SEQ ID NO: 933 - RNA, 21 nt, synthetic construct
  source 1..21: mol_type = other RNA
  modified_base 1: mod_base = OTHER; note = 2'-O-methylcytidine-3'-phosphorothioate
  modified_base 2: mod_base = OTHER; note = 2'-O-methyladenosine-3'-phosphorothioate
  modified_base 3: mod_base = OTHER; note = 2'-O-methyluridine-3'-phosphate
  modified_base 4: mod_base = OTHER; note = 2'-O-methylcytidine-3'-phosphate
  modified_base 5: mod_base = OTHER; note = 2'-O-methyluridine-3'-phosphate
  modified_base 6: mod_base = OTHER; note = 2'-O-methylguanosine-3'-phosphate
  modified_base 7: mod_base = OTHER; note = 2'-fluorouridine-3'-phosphate
  modified_base 8: mod_base = OTHER; note = 2'-O-methylguanosine-3'-phosphate
  modified_base 9: mod_base = OTHER; note = 2'-fluorocytidine-3'-phosphate
  modified_base 10: mod_base = OTHER; note = 2'-fluorouridine-3'-phosphate
  modified_base 11: mod_base = OTHER; note = 2'-fluorocytidine-3'-phosphate
  modified_base 12: mod_base = OTHER; note = 2'-O-methyluridine-3'-phosphate
  modified_base 13: mod_base = OTHER; note = 2'-O-methyluridine-3'-phosphate
  modified_base 14: mod_base = OTHER; note = 2'-O-methylcytidine-3'-phosphate
  modified_base 15: mod_base = OTHER; note = 2'-O-methylguanosine-3'-phosphate
  modified_base 16: mod_base = OTHER; note = 2'-O-methyluridine-3'-phosphate
  modified_base 17: mod_base = OTHER; note = 2'-O-methylcytidine-3'-phosphate
  modified_base 18: mod_base = OTHER; note = 2'-O-methyladenosine-3'-phosphate
  modified_base 19: mod_base = OTHER; note = 2'-O-methyluridine-3'-phosphorothioate
  modified_base 20: mod_base = OTHER; note = 2'-O-methylcytidine-3'-phosphorothioate
  modified_base 21: mod_base = OTHER; note = 2'-O-methyladenosine-3'-phosphate
catctgtgctcttcgtcatca

SEQ ID NO: 934 - RNA, 21 nt, synthetic construct
  source 1..21: mol_type = other RNA
  modified_base 1: mod_base = OTHER; note = 2'-O-methylguanosine-3'-phosphorothioate
  modified_base 2: mod_base = OTHER; note = 2'-O-methylcytidine-3'-phosphorothioate
  modified_base 3: mod_base = OTHER; note = 2'-O-methyluridine-3'-phosphate
  modified_base 4: mod_base = OTHER; note = 2'-O-methylcytidine-3'-phosphate
  modified_base 5: mod_base = OTHER; note = 2'-O-methyluridine-3'-phosphate
  modified_base 6: mod_base = OTHER; note = 2'-O-methyluridine-3'-phosphate
  modified_base 7: mod_base = OTHER; note = 2'-fluorocytidine-3'-phosphate
  modified_base 8: mod_base = OTHER; note = 2'-O-methylguanosine-3'-phosphate
  modified_base 9: mod_base = OTHER; note = 2'-fluorouridine-3'-phosphate
  modified_base 10: mod_base = OTHER; note = 2'-fluorocytidine-3'-phosphate
  modified_base 11: mod_base = OTHER; note = 2'-fluoroadenosine-3'-phosphate
  modified_base 12: mod_base = OTHER; note = 2'-O-methyluridine-3'-phosphate
  modified_base 13: mod_base = OTHER; note = 2'-O-methylcytidine-3'-phosphate
  modified_base 14: mod_base = OTHER; note = 2'-O-methyluridine-3'-phosphate
  modified_base 15: mod_base = OTHER; note = 2'-O-methylguanosine-3'-phosphate
  modified_base 16: mod_base = OTHER; note = 2'-O-methyladenosine-3'-phosphate
  modified_base 17: mod_base = OTHER; note = 2'-O-methylcytidine-3'-phosphate
  modified_base 18: mod_base = OTHER; note = 2'-O-methylcytidine-3'-phosphate
  modified_base 19: mod_base = OTHER; note = 2'-O-methyladenosine-3'-phosphorothioate
  modified_base 20: mod_base = OTHER; note = 2'-O-methylguanosine-3'-phosphorothioate
  modified_base 21: mod_base = OTHER; note = 2'-O-methyladenosine-3'-phosphate
gctcttcgtcatctgaccaga

SEQ ID NO: 935 - RNA, 21 nt, synthetic construct
  source 1..21: mol_type = other RNA
  modified_base 1: mod_base = OTHER; note = 2'-O-methyladenosine-3'-phosphorothioate
  modified_base 2: mod_base = OTHER; note = 2'-O-methyluridine-3'-phosphorothioate
  modified_base 3: mod_base = OTHER; note = 2'-O-methylguanosine-3'-phosphate
  modified_base 4: mod_base = OTHER; note = 2'-O-methylcytidine-3'-phosphate
  modified_base 5: mod_base = OTHER; note = 2'-O-methyladenosine-3'-phosphate
  modified_base 6: mod_base = OTHER; note = 2'-O-methylguanosine-3'-phosphate
  modified_base 7: mod_base = OTHER; note = 2'-fluorouridine-3'-phosphate
  modified_base 8: mod_base = OTHER; note = 2'-O-methyluridine-3'-phosphate
  modified_base 9: mod_base = OTHER; note = 2'-fluorocytidine-3'-phosphate
  modified_base 10: mod_base = OTHER; note = 2'-fluoroguanosine-3'-phosphate
  modified_base 11: mod_base = OTHER; note = 2'-fluorocytidine-3'-phosphate
  modified_base 12: mod_base = OTHER; note = 2'-O-methylcytidine-3'-phosphate
  modified_base 13: mod_base = OTHER; note = 2'-O-methyluridine-3'-phosphate
  modified_base 14: mod_base = OTHER; note = 2'-O-methyluridine-3'-phosphate
  modified_base 15: mod_base = OTHER; note = 2'-O-methylcytidine-3'-phosphate
  modified_base 16: mod_base = OTHER; note = 2'-O-methyladenosine-3'-phosphate
  modified_base 17: mod_base = OTHER; note = 2'-O-methylcytidine-3'-phosphate
  modified_base 18: mod_base = OTHER; note = 2'-O-methyluridine-3'-phosphate
  modified_base 19: mod_base = OTHER; note = 2'-O-methyladenosine-3'-phosphorothioate
  modified_base 20: mod_base = OTHER; note = 2'-O-methyluridine-3'-phosphorothioate
  modified_base 21: mod_base = OTHER; note = 2'-O-methyladenosine-3'-phosphate
atgcagttcgccttcactata

SEQ ID NO: 936 - RNA, 21 nt, synthetic construct
  source 1..21: mol_type = other RNA
  modified_base 1: mod_base = OTHER; note = 2'-O-methyluridine-3'-phosphorothioate
  modified_base 2: mod_base = OTHER; note = 2'-O-methylguanosine-3'-phosphorothioate
  modified_base 3: mod_base = OTHER; note = 2'-O-methylguanosine-3'-phosphate
  modified_base 4: mod_base = OTHER; note = 2'-O-methyluridine-3'-phosphate
  modified_base 5: mod_base = OTHER; note = 2'-O-methyluridine-3'-phosphate
  modified_base 6: mod_base = OTHER; note = 2'-O-methyladenosine-3'-phosphate
  modified_base 7: mod_base = OTHER; note = 2'-fluoroadenosine-3'-phosphate
  modified_base 8: mod_base = OTHER; note = 2'-O-methylguanosine-3'-phosphate
  modified_base 9: mod_base = OTHER; note = 2'-fluorocytidine-3'-phosphate
  modified_base 10: mod_base = OTHER; note = 2'-fluorouridine-3'-phosphate
  modified_base 11: mod_base = OTHER; note = 2'-fluorocytidine-3'-phosphate
  modified_base 12: mod_base = OTHER; note = 2'-O-methyluridine-3'-phosphate
  modified_base 13: mod_base = OTHER; note = 2'-O-methyluridine-3'-phosphate
  modified_base 14: mod_base = OTHER; note = 2'-O-methyladenosine-3'-phosphate
  modified_base 15: mod_base = OTHER; note = 2'-O-methylcytidine-3'-phosphate
  modified_base 16: mod_base = OTHER; note = 2'-O-methyladenosine-3'-phosphate
  modified_base 17: mod_base = OTHER; note = 2'-O-methylcytidine-3'-phosphate
  modified_base 18: mod_base = OTHER; note = 2'-O-methylcytidine-3'-phosphate
  modified_base 19: mod_base = OTHER; note = 2'-O-methylcytidine-3'-phosphorothioate
  modified_base 20: mod_base = OTHER; note = 2'-O-methyladenosine-3'-phosphorothioate
  modified_base 21: mod_base = OTHER; note = 2'-O-methyladenosine-3'-phosphate
tggttaagctcttacacccaa

SEQ ID NO: 937 - RNA, 21 nt, synthetic construct
  source 1..21: mol_type = other RNA
  modified_base 1: mod_base = OTHER; note = 2'-O-methylcytidine-3'-phosphorothioate
  modified_base 2: mod_base = OTHER; note = 2'-O-methyluridine-3'-phosphorothioate
  modified_base 3: mod_base = OTHER; note = 2'-O-methylguanosine-3'-phosphate
  modified_base 4: mod_base = OTHER; note = 2'-O-methyluridine-3'-phosphate
  modified_base 5: mod_base = OTHER; note = 2'-O-methyluridine-3'-phosphate
  modified_base 6: mod_base = OTHER; note = 2'-O-methylguanosine-3'-phosphate
  modified_base 7: mod_base = OTHER; note = 2'-fluoroguanosine-3'-phosphate
  modified_base 8: mod_base = OTHER; note = 2'-O-methyladenosine-3'-phosphate
  modified_base 9: mod_base = OTHER; note = 2'-fluorouridine-3'-phosphate
  modified_base 10: mod_base = OTHER; note = 2'-fluorouridine-3'-phosphate
  modified_base 11: mod_base = OTHER; note = 2'-fluoroguanosine-3'-phosphate
  modified_base 12: mod_base = OTHER; note = 2'-O-methyladenosine-3'-phosphate
  modified_base 13: mod_base = OTHER; note = 2'-O-methyluridine-3'-phosphate
  modified_base 14: mod_base = OTHER; note = 2'-O-methyluridine-3'-phosphate
  modified_base 15: mod_base = OTHER; note = 2'-O-methylcytidine-3'-phosphate
  modified_base 16: mod_base = OTHER; note = 2'-O-methylguanosine-3'-phosphate
  modified_base 17: mod_base = OTHER; note = 2'-O-methyladenosine-3'-phosphate
  modified_base 18: mod_base = OTHER; note = 2'-O-methyladenosine-3'-phosphate
  modified_base 19: mod_base = OTHER; note = 2'-O-methyladenosine-3'-phosphorothioate
  modified_base 20: mod_base = OTHER; note = 2'-O-methyluridine-3'-phosphorothioate
  modified_base 21: mod_base = OTHER; note = 2'-O-methyladenosine-3'-phosphate
ctgttggattgattcgaaata

SEQ ID NO: 938 - RNA, 21 nt, synthetic construct
  source 1..21: mol_type = other RNA
  modified_base 1: mod_base = OTHER; note = 2'-O-methyluridine-3'-phosphorothioate
  modified_base 2: mod_base = OTHER; note = 2'-O-methylguanosine-3'-phosphorothioate
  modified_base 3: mod_base = OTHER; note = 2'-O-methyluridine-3'-phosphate
  modified_base 4: mod_base = OTHER; note = 2'-O-methyluridine-3'-phosphate
  modified_base 5: mod_base = OTHER; note = 2'-O-methylguanosine-3'-phosphate
  modified_base 6: mod_base = OTHER; note = 2'-O-methylguanosine-3'-phosphate
  modified_base 7: mod_base = OTHER; note = 2'-fluoroadenosine-3'-phosphate
  modified_base 8: mod_base = OTHER; note = 2'-O-methyluridine-3'-phosphate
  modified_base 9: mod_base = OTHER; note = 2'-fluorouridine-3'-phosphate
  modified_base 10: mod_base = OTHER; note = 2'-fluoroguanosine-3'-phosphate
  modified_base 11: mod_base = OTHER; note = 2'-fluoroadenosine-3'-phosphate
  modified_base 12: mod_base = OTHER; note = 2'-O-methyluridine-3'-phosphate
  modified_base 13: mod_base = OTHER; note = 2'-O-methyluridine-3'-phosphate
  modified_base 14: mod_base = OTHER; note = 2'-O-methylcytidine-3'-phosphate
  modified_base 15: mod_base = OTHER; note = 2'-O-methylguanosine-3'-phosphate
  modified_base 16: mod_base = OTHER; note = 2'-O-methyladenosine-3'-phosphate
  modified_base 17: mod_base = OTHER; note = 2'-O-methyladenosine-3'-phosphate
  modified_base 18: mod_base = OTHER; note = 2'-O-methyladenosine-3'-phosphate
  modified_base 19: mod_base = OTHER; note = 2'-O-methyluridine-3'-phosphorothioate
  modified_base 20: mod_base = OTHER; note = 2'-O-methylcytidine-3'-phosphorothioate
  modified_base 21: mod_base = OTHER; note = 2'-O-methyladenosine-3'-phosphate
tgttggattgattcgaaatca

SEQ ID NO: 939 - RNA, 21 nt, synthetic construct
  source 1..21: mol_type = other RNA
  modified_base 1: mod_base = OTHER; note = 2'-O-methylcytidine-3'-phosphorothioate
  modified_base 2: mod_base = OTHER; note = 2'-O-methylguanosine-3'-phosphorothioate
  modified_base 3: mod_base = OTHER; note = 2'-O-methyluridine-3'-phosphate
  modified_base 4: mod_base = OTHER; note = 2'-O-methylguanosine-3'-phosphate
  modified_base 5: mod_base = OTHER; note = 2'-O-methyladenosine-3'-phosphate
  modified_base 6: mod_base = OTHER; note = 2'-O-methylguanosine-3'-phosphate
  modified_base 7: mod_base = OTHER; note = 2'-fluorocytidine-3'-phosphate
  modified_base 8: mod_base = OTHER; note = 2'-O-methyladenosine-3'-phosphate
  modified_base 9: mod_base = OTHER; note = 2'-fluoroguanosine-3'-phosphate
  modified_base 10: mod_base = OTHER; note = 2'-fluoroguanosine-3'-phosphate
  modified_base 11: mod_base = OTHER; note = 2'-fluoroguanosine-3'-phosphate
  modified_base 12: mod_base = OTHER; note = 2'-O-methyluridine-3'-phosphate
  modified_base 13: mod_base = OTHER; note = 2'-O-methylguanosine-3'-phosphate
  modified_base 14: mod_base = OTHER; note = 2'-O-methylcytidine-3'-phosphate
  modified_base 15: mod_base = OTHER; note = 2'-O-methylcytidine-3'-phosphate
  modified_base 16: mod_base = OTHER; note = 2'-O-methyladenosine-3'-phosphate
  modified_base 17: mod_base = OTHER; note = 2'-O-methyluridine-3'-phosphate
  modified_base 18: mod_base = OTHER; note = 2'-O-methyluridine-3'-phosphate
  modified_base 19: mod_base = OTHER; note = 2'-O-methylcytidine-3'-phosphorothioate
  modified_base 20: mod_base = OTHER; note = 2'-O-methylcytidine-3'-phosphorothioate
  modified_base 21: mod_base = OTHER; note = 2'-O-methyladenosine-3'-phosphate
cgtgagcagggtgccattcca

SEQ ID NO: 940 - RNA, 21 nt, synthetic construct
  source 1..21: mol_type = other RNA
  modified_base 1: mod_base = OTHER; note = 2'-O-methylcytidine-3'-phosphorothioate
  modified_base 2: mod_base = OTHER; note = 2'-O-methylcytidine-3'-phosphorothioate
  modified_base 3: mod_base = OTHER; note = 2'-O-methyladenosine-3'-phosphate
  modified_base 4: mod_base = OTHER; note = 2'-O-methylcytidine-3'-phosphate
  modified_base 5: mod_base = OTHER; note = 2'-O-methylguanosine-3'-phosphate
  modified_base 6: mod_base = OTHER; note = 2'-O-methyladenosine-3'-phosphate
  modified_base 7: mod_base = OTHER; note = 2'-fluorocytidine-3'-phosphate
  modified_base 8: mod_base = OTHER; note = 2'-O-methyluridine-3'-phosphate
  modified_base 9: mod_base = OTHER; note = 2'-fluoroadenosine-3'-phosphate
  modified_base 10: mod_base = OTHER; note = 2'-fluoroguanosine-3'-phosphate
  modified_base 11: mod_base = OTHER; note = 2'-fluorouridine-3'-phosphate
  modified_base 12: mod_base = OTHER; note = 2'-O-methyluridine-3'-phosphate
  modified_base 13: mod_base = OTHER; note = 2'-O-methylcytidine-3'-phosphate
  modified_base 14: mod_base = OTHER; note = 2'-O-methyladenosine-3'-phosphate
  modified_base 15: mod_base = OTHER; note = 2'-O-methylguanosine-3'-phosphate
  modified_base 16: mod_base = OTHER; note = 2'-O-methyluridine-3'-phosphate
  modified_base 17: mod_base = OTHER; note = 2'-O-methyluridine-3'-phosphate
  modified_base 18: mod_base = OTHER; note = 2'-O-methylguanosine-3'-phosphate
  modified_base 19: mod_base = OTHER; note = 2'-O-methylcytidine-3'-phosphorothioate
  modified_base 20: mod_base = OTHER; note = 2'-O-methyluridine-3'-phosphorothioate
  modified_base 21: mod_base = OTHER; note = 2'-O-methyladenosine-3'-phosphate
ccacgactagttcagttgcta

SEQ ID NO: 941 - RNA, 21 nt, synthetic construct
  source 1..21: mol_type = other RNA
  modified_base 1: mod_base = OTHER; note = 2'-O-methyluridine-3'-phosphorothioate
  modified_base 2: mod_base = OTHER; note = 2'-O-methyluridine-3'-phosphorothioate
  modified_base 3: mod_base = OTHER; note = 2'-O-methylcytidine-3'-phosphate
  modified_base 4: mod_base = OTHER; note = 2'-O-methyladenosine-3'-phosphate
  modified_base 5: mod_base = OTHER; note = 2'-O-methylguanosine-3'-phosphate
  modified_base 6: mod_base = OTHER; note = 2'-O-methyluridine-3'-phosphate
  modified_base 7: mod_base = OTHER; note = 2'-fluorouridine-3'-phosphate
  modified_base 8: mod_base = OTHER; note = 2'-O-methylguanosine-3'-phosphate
  modified_base 9: mod_base = OTHER; note = 2'-fluorocytidine-3'-phosphate
  modified_base 10: mod_base = OTHER; note = 2'-fluorouridine-3'-phosphate
  modified_base 11: mod_base = OTHER; note = 2'-fluorouridine-3'-phosphate
  modified_base 12: mod_base = OTHER; note = 2'-O-methylguanosine-3'-phosphate
  modified_base 13: mod_base = OTHER; note = 2'-O-methyluridine-3'-phosphate
  modified_base 14: mod_base = OTHER; note = 2'-O-methyluridine-3'-phosphate
  modified_base 15: mod_base = OTHER; note = 2'-O-methylcytidine-3'-phosphate
  modified_base 16: mod_base = OTHER; note = 2'-O-methylguanosine-3'-phosphate
  modified_base 17: mod_base = OTHER; note = 2'-O-methyluridine-3'-phosphate
  modified_base 18: mod_base = OTHER; note = 2'-O-methylguanosine-3'-phosphate
  modified_base 19: mod_base = OTHER; note = 2'-O-methylcytidine-3'-phosphorothioate
  modified_base 20: mod_base = OTHER; note = 2'-O-methyladenosine-3'-phosphorothioate
  modified_base 21: mod_base = OTHER; note = 2'-O-methyladenosine-3'-phosphate
ttcagttgcttgttcgtgcaa

SEQ ID NO: 942 - RNA, 21 nt, synthetic construct
  source 1..21: mol_type = other RNA
  modified_base 1: mod_base = OTHER; note = 2'-O-methyluridine-3'-phosphorothioate
  modified_base 2: mod_base = OTHER; note = 2'-O-methylcytidine-3'-phosphorothioate
  modified_base 3: mod_base = OTHER; note = 2'-O-methyladenosine-3'-phosphate
  modified_base 4: mod_base = OTHER; note = 2'-O-methylguanosine-3'-phosphate
  modified_base 5: mod_base = OTHER; note = 2'-O-methyluridine-3'-phosphate
  modified_base 6: mod_base = OTHER; note = 2'-O-methyluridine-3'-phosphate
  modified_base 7: mod_base = OTHER; note = 2'-fluoroguanosine-3'-phosphate
  modified_base 8: mod_base = OTHER; note = 2'-O-methylcytidine-3'-phosphate
  modified_base 9: mod_base = OTHER; note = 2'-fluorouridine-3'-phosphate
  modified_base 10: mod_base = OTHER; note = 2'-fluorouridine-3'-phosphate
  modified_base 11: mod_base = OTHER; note = 2'-fluoroguanosine-3'-phosphate
  modified_base 12: mod_base = OTHER; note = 2'-O-methyluridine-3'-phosphate
  modified_base 13: mod_base = OTHER; note = 2'-O-methyluridine-3'-phosphate
  modified_base 14: mod_base = OTHER; note = 2'-O-methylcytidine-3'-phosphate
  modified_base 15: mod_base = OTHER; note = 2'-O-methylguanosine-3'-phosphate
  modified_base 16: mod_base = OTHER; note = 2'-O-methyluridine-3'-phosphate
  modified_base 17: mod_base = OTHER; note = 2'-O-methylguanosine-3'-phosphate
  modified_base 18: mod_base = OTHER; note = 2'-O-methylcytidine-3'-phosphate
  modified_base 19: mod_base = OTHER; note = 2'-O-methyladenosine-3'-phosphorothioate
  modified_base 20: mod_base = OTHER; note = 2'-O-methylcytidine-3'-phosphorothioate
  modified_base 21: mod_base = OTHER; note = 2'-O-methyladenosine-3'-phosphate
tcagttgcttgttcgtgcaca

SEQ ID NO: 943 - RNA, 21 nt, synthetic construct
  source 1..21: mol_type = other RNA
  modified_base 1: mod_base = OTHER; note = 2'-O-methyladenosine-3'-phosphorothioate
  modified_base 2: mod_base = OTHER; note = 2'-O-methylguanosine-3'-phosphorothioate
  modified_base 3: mod_base = OTHER; note = 2'-O-methyluridine-3'-phosphate
  modified_base 4: mod_base = OTHER; note = 2'-O-methyluridine-3'-phosphate
  modified_base 5: mod_base = OTHER; note = 2'-O-methylguanosine-3'-phosphate
  modified_base 6: mod_base = OTHER; note = 2'-O-methylcytidine-3'-phosphate
  modified_base 7: mod_base = OTHER; note = 2'-fluorouridine-3'-phosphate
  modified_base 8: mod_base = OTHER; note = 2'-O-methyluridine-3'-phosphate
  modified_base 9: mod_base = OTHER; note = 2'-fluoroguanosine-3'-phosphate
  modified_base 10: mod_base = OTHER; note = 2'-fluorouridine-3'-phosphate
  modified_base 11: mod_base = OTHER; note = 2'-fluorouridine-3'-phosphate
  modified_base 12: mod_base = OTHER; note = 2'-O-methylcytidine-3'-phosphate
  modified_base 13: mod_base = OTHER; note = 2'-O-methylguanosine-3'-phosphate
  modified_base 14: mod_base = OTHER; note = 2'-O-methyluridine-3'-phosphate
  modified_base 15: mod_base = OTHER; note = 2'-O-methylguanosine-3'-phosphate
  modified_base 16: mod_base = OTHER; note = 2'-O-methylcytidine-3'-phosphate
  modified_base 17: mod_base = OTHER; note = 2'-O-methyladenosine-3'-phosphate
  modified_base 18: mod_base = OTHER; note = 2'-O-methylcytidine-3'-phosphate
  modified_base 19: mod_base = OTHER; note = 2'-O-methyladenosine-3'-phosphorothioate
  modified_base 20: mod_base = OTHER; note = 2'-O-methyluridine-3'-phosphorothioate
  modified_base 21: mod_base = OTHER; note = 2'-O-methyladenosine-3'-phosphate
agttgcttgttcgtgcacata

SEQ ID NO: 944 - RNA, 21 nt, synthetic construct
  source 1..21: mol_type = other RNA
  modified_base 1: mod_base = OTHER; note = 2'-O-methylcytidine-3'-phosphorothioate
  modified_base 2: mod_base = OTHER; note = 2'-O-methyladenosine-3'-phosphorothioate
  modified_base 3: mod_base = OTHER; note = 2'-O-methylguanosine-3'-phosphate
  modified_base 4: mod_base = OTHER; note = 2'-O-methyladenosine-3'-phosphate
  modified_base 5: mod_base = OTHER; note = 2'-O-methylguanosine-3'-phosphate
  modified_base 6: mod_base = OTHER; note = 2'-O-methylguanosine-3'-phosphate
  modified_base 7: mod_base = OTHER; note = 2'-fluoroadenosine-3'-phosphate
  modified_base 8: mod_base = OTHER; note = 2'-O-methylcytidine-3'-phosphate
  modified_base 9: mod_base = OTHER; note = 2'-fluorouridine-3'-phosphate
  modified_base 10: mod_base = OTHER; note = 2'-fluoroadenosine-3'-phosphate
  modified_base 11: mod_base = OTHER; note = 2'-fluoroadenosine-3'-phosphate
  modified_base 12: mod_base = OTHER; note = 2'-O-methyladenosine-3'-phosphate
  modified_base 13: mod_base = OTHER; note = 2'-O-methyluridine-3'-phosphate
  modified_base 14: mod_base = OTHER; note = 2'-O-methyladenosine-3'-phosphate
  modified_base 15: mod_base = OTHER; note = 2'-O-methylcytidine-3'-phosphate
  modified_base 16: mod_base = OTHER; note = 2'-O-methylcytidine-3'-phosphate
  modified_base 17: mod_base = OTHER; note = 2'-O-methyladenosine-3'-phosphate
  modified_base 18: mod_base = OTHER; note = 2'-O-methyluridine-3'-phosphate
  modified_base 19: mod_base = OTHER; note = 2'-O-methyluridine-3'-phosphorothioate
  modified_base 20: mod_base = OTHER; note = 2'-O-methylcytidine-3'-phosphorothioate
  modified_base 21: mod_base = OTHER; note = 2'-O-methyladenosine-3'-phosphate
cagaggactaaataccattca

SEQ ID NO: 945 - RNA, 21 nt, synthetic construct
  source 1..21: mol_type = other RNA
  modified_base 1: mod_base = OTHER; note = 2'-O-methylguanosine-3'-phosphorothioate
  modified_base 2: mod_base = OTHER; note = 2'-O-methyladenosine-3'-phosphorothioate
  modified_base 3: mod_base = OTHER; note = 2'-O-methylcytidine-3'-phosphate
  modified_base 4: mod_base = OTHER; note = 2'-O-methyluridine-3'-phosphate
  modified_base 5: mod_base = OTHER; note = 2'-O-methyladenosine-3'-phosphate
  modified_base 6: mod_base = OTHER; note = 2'-O-methyladenosine-3'-phosphate
  modified_base 7: mod_base = OTHER; note = 2'-fluoroadenosine-3'-phosphate
  modified_base 8: mod_base = OTHER; note = 2'-O-methyluridine-3'-phosphate
  modified_base 9: mod_base = OTHER; note = 2'-fluoroadenosine-3'-phosphate
  modified_base 10: mod_base = OTHER; note = 2'-fluorocytidine-3'-phosphate
  modified_base 11: mod_base = OTHER; note = 2'-fluorocytidine-3'-phosphate
  modified_base 12: mod_base = OTHER; note = 2'-O-methyladenosine-3'-phosphate
  modified_base 13: mod_base = OTHER; note = 2'-O-methyluridine-3'-phosphate
  modified_base 14: mod_base = OTHER; note = 2'-O-methyluridine-3'-phosphate
  modified_base 15: mod_base = OTHER; note = 2'-O-methylcytidine-3'-phosphate
  modified_base 16: mod_base = OTHER; note = 2'-O-methylcytidine-3'-phosphate
  modified_base 17: mod_base = OTHER; note = 2'-O-methyladenosine-3'-phosphate
  modified_base 18: mod_base = OTHER; note = 2'-O-methyluridine-3'-phosphate
  modified_base 19: mod_base = OTHER; note = 2'-O-methyluridine-3'-phosphorothioate
  modified_base 20: mod_base = OTHER; note = 2'-O-methylguanosine-3'-phosphorothioate
  modified_base 21: mod_base = OTHER; note = 2'-O-methyladenosine-3'-phosphate
gactaaataccattccattga

SEQ ID NO: 946 - RNA, 21 nt, synthetic construct
  source 1..21: mol_type = other RNA
  modified_base 1: mod_base = OTHER; note = 2'-O-methylcytidine-3'-phosphorothioate
  modified_base 2: mod_base = OTHER; note = 2'-O-methylcytidine-3'-phosphorothioate
  modified_base 3: mod_base = OTHER; note = 2'-O-methyladenosine-3'-phosphate
  modified_base 4: mod_base = OTHER; note = 2'-O-methyluridine-3'-phosphate
  modified_base 5: mod_base = OTHER; note = 2'-O-methyluridine-3'-phosphate
  modified_base 6: mod_base = OTHER; note = 2'-O-methylcytidine-3'-phosphate
  modified_base 7: mod_base = OTHER; note = 2'-fluorocytidine-3'-phosphate
  modified_base 8: mod_base = OTHER; note = 2'-O-methyladenosine-3'-phosphate
  modified_base 9: mod_base = OTHER; note = 2'-fluorouridine-3'-phosphate
  modified_base 10: mod_base = OTHER; note = 2'-fluorouridine-3'-phosphate
  modified_base 11: mod_base = OTHER; note = 2'-fluoroguanosine-3'-phosphate
  modified_base 12: mod_base = OTHER; note = 2'-O-methyluridine-3'-phosphate
  modified_base 13: mod_base = OTHER; note = 2'-O-methyluridine-3'-phosphate
  modified_base 14: mod_base = OTHER; note = 2'-O-methyluridine-3'-phosphate
  modified_base 15: mod_base = OTHER; note = 2'-O-methylguanosine-3'-phosphate
  modified_base 16: mod_base = OTHER; note = 2'-O-methyluridine-3'-phosphate
  modified_base 17: mod_base = OTHER; note = 2'-O-methylguanosine-3'-phosphate
  modified_base 18: mod_base = OTHER; note = 2'-O-methylcytidine-3'-phosphate
  modified_base 19: mod_base = OTHER; note = 2'-O-methyladenosine-3'-phosphorothioate
  modified_base 20: mod_base = OTHER; note = 2'-O-methylguanosine-3'-phosphorothioate
  modified_base 21: mod_base = OTHER; note = 2'-O-methyladenosine-3'-phosphate
ccattccattgtttgtgcaga

SEQ ID NO: 947 - RNA, 21 nt, synthetic construct
  source 1..21: mol_type = other RNA
  modified_base 1: mod_base = OTHER; note = 2'-O-methyladenosine-3'-phosphorothioate
  modified_base 2: mod_base = OTHER; note = 2'-O-methyluridine-3'-phosphorothioate
  modified_base 3: mod_base = OTHER; note = 2'-O-methyluridine-3'-phosphate
  modified_base 4: mod_base = OTHER; note = 2'-O-methylcytidine-3'-phosphate
  modified_base 5: mod_base = OTHER; note = 2'-O-methylcytidine-3'-phosphate
  modified_base 6: mod_base = OTHER; note = 2'-O-methyladenosine-3'-phosphate
  modified_base 7: mod_base = OTHER; note = 2'-fluorouridine-3'-phosphate
  modified_base 8: mod_base = OTHER; note = 2'-O-methyluridine-3'-phosphate
  modified_base 9: mod_base = OTHER; note = 2'-fluoroguanosine-3'-phosphate
  modified_base 10: mod_base = OTHER; note = 2'-fluorouridine-3'-phosphate
  modified_base 11: mod_base = OTHER; note = 2'-fluorouridine-3'-phosphate
  modified_base 12: mod_base = OTHER; note = 2'-O-methyluridine-3'-phosphate
  modified_base 13: mod_base = OTHER; note = 2'-O-methylguanosine-3'-phosphate
  modified_base 14: mod_base = OTHER; note = 2'-O-methyluridine-3'-phosphate
  modified_base 15: mod_base = OTHER; note = 2'-O-methylguanosine-3'-phosphate
  modified_base 16: mod_base = OTHER; note = 2'-O-methylcytidine-3'-phosphate
  modified_base 17: mod_base = OTHER; note = 2'-O-methyladenosine-3'-phosphate
  modified_base 18: mod_base = OTHER; note = 2'-O-methylguanosine-3'-phosphate
  modified_base 19: mod_base = OTHER; note = 2'-O-methylcytidine-3'-phosphorothioate
  modified_base 20: mod_base = OTHER; note = 2'-O-methyluridine-3'-phosphorothioate
  modified_base 21: mod_base = OTHER; note = 2'-O-methyladenosine-3'-phosphate
attccattgtttgtgcagcta

SEQ ID NO: 948 - RNA, 21 nt, synthetic construct
  source 1..21: mol_type = other RNA
  modified_base 1: mod_base = OTHER; note = 2'-O-methyluridine-3'-phosphorothioate
  modified_base 2: mod_base = OTHER; note = 2'-O-methyluridine-3'-phosphorothioate
  modified_base 3: mod_base = OTHER; note = 2'-O-methylcytidine-3'-phosphate
  modified_base 4: mod_base = OTHER; note = 2'-O-methylcytidine-3'-phosphate
  modified_base 5: mod_base = OTHER; note = 2'-O-methyladenosine-3'-phosphate
  modified_base 6: mod_base = OTHER; note = 2'-O-methyluridine-3'-phosphate
  modified_base 7: mod_base = OTHER; note = 2'-fluorouridine-3'-phosphate
  modified_base 8: mod_base = OTHER; note = 2'-O-methylguanosine-3'-phosphate
  modified_base 9: mod_base = OTHER; note = 2'-fluorouridine-3'-phosphate
  modified_base 10: mod_base = OTHER; note = 2'-fluorouridine-3'-phosphate
  modified_base 11: mod_base = OTHER; note = 2'-fluorouridine-3'-phosphate
  modified_base 12: mod_base = OTHER; note = 2'-O-methylguanosine-3'-phosphate
  modified_base 13: mod_base = OTHER; note = 2'-O-methyluridine-3'-phosphate
  modified_base 14: mod_base = OTHER; note = 2'-O-methylguanosine-3'-phosphate
  modified_base 15: mod_base = OTHER; note = 2'-O-methylcytidine-3'-phosphate
  modified_base 16: mod_base = OTHER; note = 2'-O-methyladenosine-3'-phosphate
  modified_base 17: mod_base = OTHER; note = 2'-O-methylguanosine-3'-phosphate
  modified_base 18: mod_base = OTHER; note = 2'-O-methylcytidine-3'-phosphate
  modified_base 19: mod_base = OTHER; note = 2'-O-methyluridine-3'-phosphorothioate
  modified_base 20: mod_base = OTHER; note = 2'-O-methylguanosine-3'-phosphorothioate
  modified_base 21: mod_base = OTHER; note = 2'-O-methyladenosine-3'-phosphate
ttccattgtttgtgcagctga

SEQ ID NO: 949 - RNA, 21 nt, synthetic construct
  source 1..21: mol_type = other RNA
  modified_base 1: mod_base = OTHER; note = 2'-O-methylcytidine-3'-phosphorothioate
  modified_base 2: mod_base = OTHER; note = 2'-O-methylcytidine-3'-phosphorothioate
  modified_base 3: mod_base = OTHER; note = 2'-O-methyladenosine-3'-phosphate
  modified_base 4: mod_base = OTHER; note = 2'-O-methyluridine-3'-phosphate
  modified_base 5: mod_base = OTHER; note = 2'-O-methyluridine-3'-phosphate
  modified_base 6: mod_base = OTHER; note = 2'-O-methylguanosine-3'-phosphate
  modified_base 7: mod_base = OTHER; note = 2'-fluorouridine-3'-phosphate
  modified_base 8: mod_base = OTHER; note = 2'-O-methyluridine-3'-phosphate
  modified_base 9: mod_base = OTHER; note = 2'-fluorouridine-3'-phosphate
  modified_base 10: mod_base = OTHER; note = 2'-fluoroguanosine-3'-phosphate
  modified_base 11: mod_base = OTHER; note = 2'-fluorouridine-3'-phosphate
  modified_base 12: mod_base = OTHER; note = 2'-O-methylguanosine-3'-phosphate
  modified_base 13: mod_base = OTHER; note = 2'-O-methylcytidine-3'-phosphate
  modified_base 14: mod_base = OTHER; note = 2'-O-methyladenosine-3'-phosphate
  modified_base 15: mod_base = OTHER; note = 2'-O-methylguanosine-3'-phosphate
  modified_base 16: mod_base = OTHER; note = 2'-O-methylcytidine-3'-phosphate
  modified_base 17: mod_base = OTHER; note = 2'-O-methyluridine-3'-phosphate
  modified_base 18: mod_base = OTHER; note = 2'-O-methylguanosine-3'-phosphate
  modified_base 19: mod_base = OTHER; note = 2'-O-methylcytidine-3'-phosphorothioate
  modified_base 20: mod_base = OTHER; note = 2'-O-methyluridine-3'-phosphorothioate
  modified_base 21: mod_base = OTHER; note = 2'-O-methyladenosine-3'-phosphate
ccattgtttgtgcagctgcta

SEQ ID NO: 950 - RNA, 21 nt, synthetic construct
  source 1..21: mol_type = other RNA
  modified_base 1: mod_base = OTHER; note = 2'-O-methylguanosine-3'-phosphorothioate
  modified_base 2: mod_base = OTHER; note = 2'-O-methylcytidine-3'-phosphorothioate
  modified_base 3: mod_base = OTHER; note = 2'-O-methylcytidine-3'-phosphate
  modified_base 4: mod_base = OTHER; note = 2'-O-methyladenosine-3'-phosphate
  modified_base 5: mod_base = OTHER; note = 2'-O-methylcytidine-3'-phosphate
  modified_base 6: mod_base = OTHER; note = 2'-O-methyladenosine-3'-phosphate
  modified_base 7: mod_base = OTHER; note = 2'-fluoroguanosine-3'-phosphate
  modified_base 8: mod_base = OTHER; note = 2'-O-methylcytidine-3'-phosphate
  modified_base 9: mod_base = OTHER; note = 2'-fluorouridine-3'-phosphate
  modified_base 10: mod_base = OTHER; note = 2'-fluorocytidine-3'-phosphate
  modified_base 11: mod_base = OTHER; note = 2'-fluorocytidine-3'-phosphate
  modified_base 12: mod_base = OTHER; note = 2'-O-methyluridine-3'-phosphate
  modified_base 13: mod_base = OTHER; note = 2'-O-methylcytidine-3'-phosphate
  modified_base 14: mod_base = OTHER; note = 2'-O-methyluridine-3'-phosphate
  modified_base 15: mod_base = OTHER; note = 2'-O-methylguanosine-3'-phosphate
  modified_base 16: mod_base = OTHER; note = 2'-O-methyladenosine-3'-phosphate
  modified_base 17: mod_base = OTHER; note = 2'-O-methylcytidine-3'-phosphate
  modified_base 18: mod_base = OTHER; note = 2'-O-methyladenosine-3'-phosphate
  modified_base 19: mod_base = OTHER; note = 2'-O-methylguanosine-3'-phosphorothioate
  modified_base 20: mod_base = OTHER; note = 2'-O-methyladenosine-3'-phosphorothioate
  modified_base 21: mod_base = OTHER; note = 2'-O-methyladenosine-3'-phosphate
gccacagctcctctgacagaa

SEQ ID NO: 951 - RNA, 21 nt, synthetic construct
  source 1..21: mol_type = other RNA
  modified_base 1: mod_base = OTHER; note = 2'-O-methyladenosine-3'-phosphorothioate
  modified_base 2: mod_base = OTHER; note = 2'-O-methyladenosine-3'-phosphorothioate
  modified_base 3: mod_base = OTHER; note = 2'-O-methylguanosine-3'-phosphate
  modified_base 4: mod_base = OTHER; note = 2'-O-methylcytidine-3'-phosphate
  modified_base 5: mod_base = OTHER; note = 2'-O-methylcytidine-3'-phosphate
  modified_base 6: mod_base = OTHER; note = 2'-O-methyladenosine-3'-phosphate
  modified_base 7: mod_base = OTHER; note = 2'-fluorocytidine-3'-phosphate
  modified_base 8: mod_base = OTHER; note = 2'-O-methyladenosine-3'-phosphate
  modified_base 9: mod_base = OTHER; note = 2'-fluoroadenosine-3'-phosphate
  modified_base 10: mod_base = OTHER; note = 2'-fluoroguanosine-3'-phosphate
  modified_base 11: mod_base = OTHER; note = 2'-fluoroadenosine-3'-phosphate
  modified_base 12: mod_base = OTHER; note = 2'-O-methyluridine-3'-phosphate
  modified_base 13: mod_base = OTHER; note = 2'-O-methyluridine-3'-phosphate
  modified_base 14: mod_base = OTHER; note = 2'-O-methyladenosine-3'-phosphate
  modified_base 15: mod_base = OTHER; note = 2'-O-methylcytidine-3'-phosphate
  modified_base 16: mod_base = OTHER; note = 2'-O-methyladenosine-3'-phosphate
  modified_base 17: mod_base = OTHER; note = 2'-O-methyladenosine-3'-phosphate
  modified_base 18: mod_base = OTHER; note = 2'-O-methylguanosine-3'-phosphate
  modified_base 19: mod_base = OTHER; note = 2'-O-methyladenosine-3'-phosphorothioate
  modified_base 20: mod_base = OTHER; note = 2'-O-methyladenosine-3'-phosphorothioate
  modified_base 21: mod_base = OTHER; note = 2'-O-methyladenosine-3'-phosphate
aagccacaagattacaagaaa

SEQ ID NO: 952 - RNA, 21 nt, synthetic construct
  source 1..21: mol_type = other RNA
  modified_base 1: mod_base = OTHER; note = 2'-O-methylcytidine-3'-phosphorothioate
  modified_base 2: mod_base = OTHER; note = 2'-O-methylcytidine-3'-phosphorothioate
  modified_base 3: mod_base = OTHER; note = 2'-O-methyladenosine-3'-phosphate
  modified_base 4: mod_base = OTHER; note = 2'-O-methylcytidine-3'-phosphate
  modified_base 5: mod_base = OTHER; note = 2'-O-methyladenosine-3'-phosphate
  modified_base 6: mod_base = OTHER; note = 2'-O-methyladenosine-3'-phosphate
  modified_base 7: mod_base = OTHER; note = 2'-fluoroguanosine-3'-phosphate
  modified_base 8: mod_base = OTHER; note = 2'-O-methyladenosine-3'-phosphate
  modified_base 9: mod_base = OTHER; note = 2'-fluorouridine-3'-phosphate
  modified_base 10: mod_base = OTHER; note = 2'-fluorouridine-3'-phosphate
  modified_base 11: mod_base = OTHER; note = 2'-fluoroadenosine-3'-phosphate
  modified_base 12: mod_base = OTHER; note = 2'-O-methylcytidine-3'-phosphate
  modified_base 13: mod_base = OTHER; note = 2'-O-methyladenosine-3'-phosphate
  modified_base 14: mod_base = OTHER; note = 2'-O-methyladenosine-3'-phosphate
  modified_base 15: mod_base = OTHER; note = 2'-O-methylguanosine-3'-phosphate
  modified_base 16: mod_base = OTHER; note = 2'-O-methyladenosine-3'-phosphate
  modified_base 17: mod_base = OTHER; note = 2'-O-methyladenosine-3'-phosphate
  modified_base 18: mod_base = OTHER; note = 2'-O-methyladenosine-3'-phosphate
  modified_base 19: mod_base = OTHER; note = 2'-O-methylcytidine-3'-phosphorothioate
  modified_base 20: mod_base = OTHER; note = 2'-O-methylguanosine-3'-phosphorothioate
  modified_base 21: mod_base = OTHER; note = 2'-O-methyladenosine-3'-phosphate
ccacaagattacaagaaacga

SEQ ID NO: 953 - RNA, 21 nt, synthetic construct
  source 1..21: mol_type = other RNA
  modified_base 1: mod_base = OTHER; note = 2'-O-methyladenosine-3'-phosphorothioate
  modified_base 2: mod_base = OTHER; note = 2'-O-methyladenosine-3'-phosphorothioate
  modified_base 3: mod_base = OTHER; note = 2'-O-methylguanosine-3'-phosphate
  modified_base 4: mod_base = OTHER; note = 2'-O-methyladenosine-3'-phosphate
  modified_base 5: mod_base = OTHER; note = 2'-O-methyluridine-3'-phosphate
  modified_base 6: mod_base = OTHER; note = 2'-O-methyluridine-3'-phosphate
  modified_base 7: mod_base = OTHER; note = 2'-fluoroadenosine-3'-phosphate
  modified_base 8: mod_base = OTHER; note = 2'-O-methylcytidine-3'-phosphate
  modified_base 9: mod_base = OTHER; note = 2'-fluoroadenosine-3'-phosphate
  modified_base 10: mod_base = OTHER; note = 2'-fluoroadenosine-3'-phosphate
  modified_base 11: mod_base = OTHER; note = 2'-fluoroguanosine-3'-phosphate
  modified_base 12: mod_base = OTHER; note = 2'-O-methyladenosine-3'-phosphate
  modified_base 13: mod_base = OTHER; note = 2'-O-methyladenosine-3'-phosphate
  modified_base 14: mod_base = OTHER; note = 2'-O-methyladenosine-3'-phosphate
  modified_base 15: mod_base = OTHER; note = 2'-O-methylcytidine-3'-phosphate
  modified_base 16: mod_base = OTHER; note = 2'-O-methylguanosine-3'-phosphate
  modified_base 17: mod_base = OTHER; note = 2'-O-methylguanosine-3'-phosphate
  modified_base 18: mod_base = OTHER; note = 2'-O-methylcytidine-3'-phosphate
  modified_base 19: mod_base = OTHER; note = 2'-O-methyluridine-3'-phosphorothioate
  modified_base 20: mod_base = OTHER; note = 2'-O-methyluridine-3'-phosphorothioate
  modified_base 21: mod_base = OTHER; note = 2'-O-methyladenosine-3'-phosphate
aagattacaagaaacggctta

SEQ ID NO: 954 - RNA, 21 nt, synthetic construct
  source 1..21: mol_type = other RNA
  modified_base 1: mod_base = OTHER; note = 2'-O-methyladenosine-3'-phosphorothioate
  modified_base 2: mod_base = OTHER; note = 2'-O-methyluridine-3'-phosphorothioate
  modified_base 3: mod_base = OTHER; note = 2'-O-methyluridine-3'-phosphate
  modified_base 4: mod_base = OTHER; note = 2'-O-methyladenosine-3'-phosphate
  modified_base 5: mod_base = OTHER; note = 2'-O-methylcytidine-3'-phosphate
  modified_base 6: mod_base = OTHER; note = 2'-O-methyladenosine-3'-phosphate
  modified_base 7: mod_base = OTHER; note = 2'-fluoroadenosine-3'-phosphate
  modified_base 8: mod_base = OTHER; note = 2'-O-methylguanosine-3'-phosphate
  modified_base 9: mod_base = OTHER; note = 2'-fluoroadenosine-3'-phosphate
  modified_base 10: mod_base = OTHER; note = 2'-fluoroadenosine-3'-phosphate
  modified_base 11: mod_base = OTHER; note = 2'-fluoroadenosine-3'-phosphate
  modified_base 12: mod_base = OTHER; note = 2'-O-methylcytidine-3'-phosphate
  modified_base 13: mod_base = OTHER; note = 2'-O-methylguanosine-3'-phosphate
  modified_base 14: mod_base = OTHER; note = 2'-O-methylguanosine-3'-phosphate
  modified_base 15: mod_base = OTHER; note = 2'-O-methylcytidine-3'-phosphate
  modified_base 16: mod_base = OTHER; note = 2'-O-methyluridine-3'-phosphate
  modified_base 17: mod_base = OTHER; note = 2'-O-methyluridine-3'-phosphate
  modified_base 18: mod_base = OTHER; note = 2'-O-methyluridine-3'-phosphate
  modified_base 19: mod_base = OTHER; note = 2'-O-methylcytidine-3'-phosphorothioate
  modified_base 20: mod_base = OTHER; note = 2'-O-methyladenosine-3'-phosphorothioate
  modified_base 21: mod_base = OTHER; note = 2'-O-methyladenosine-3'-phosphate
attacaagaaacggctttcaa

SEQ ID NO: 955 - RNA, 21 nt, synthetic construct
  source 1..21: mol_type = other RNA
  modified_base 1: mod_base = OTHER; note = 2'-O-methylguanosine-3'-phosphorothioate
  modified_base 2: mod_base = OTHER; note = 2'-O-methylguanosine-3'-phosphorothioate
  modified_base 3: mod_base = OTHER; note = 2'-O-methylcytidine-3'-phosphate
  modified_base 4: mod_base = OTHER; note = 2'-O-methyluridine-3'-phosphate
  modified_base 5: mod_base = OTHER; note = 2'-O-methyluridine-3'-phosphate
  modified_base 6: mod_base = OTHER; note = 2'-O-methyluridine-3'-phosphate
  modified_base 7: mod_base = OTHER; note = 2'-fluorocytidine-3'-phosphate
  modified_base 8: mod_base = OTHER; note = 2'-O-methyladenosine-3'-phosphate
  modified_base 9: mod_base = OTHER; note = 2'-fluoroguanosine-3'-phosphate
  modified_base 10: mod_base = OTHER; note = 2'-fluorouridine-3'-phosphate
  modified_base 11: mod_base = OTHER; note = 2'-fluorouridine-3'-phosphate
  modified_base 12: mod_base = OTHER; note = 2'-O-methylguanosine-3'-phosphate
  modified_base 13: mod_base = OTHER; note = 2'-O-methyladenosine-3'-phosphate
  modified_base 14: mod_base = OTHER; note = 2'-O-methylguanosine-3'-phosphate
  modified_base 15: mod_base = OTHER; note = 2'-O-methylcytidine-3'-phosphate
  modified_base 16: mod_base = OTHER; note = 2'-O-methyluridine-3'-phosphate
  modified_base 17: mod_base = OTHER; note = 2'-O-methylguanosine-3'-phosphate
  modified_base 18: mod_base = OTHER; note = 2'-O-methyladenosine-3'-phosphate
  modified_base 19: mod_base = OTHER; note = 2'-O-methylcytidine-3'-phosphorothioate
  modified_base 20: mod_base = OTHER; note = 2'-O-methylcytidine-3'-phosphorothioate
  modified_base 21: mod_base = OTHER; note = 2'-O-methyladenosine-3'-phosphate
ggctttcagttgagctgacca

SEQ ID NO: 956 - RNA, 21 nt, synthetic construct
  source 1..21: mol_type = other RNA
  modified_base 1: mod_base = OTHER; note = 2'-O-methyluridine-3'-phosphorothioate
  modified_base 2: mod_base = OTHER; note = 2'-O-methylguanosine-3'-phosphorothioate
  modified_base 3: mod_base = OTHER; note = 2'-O-methyladenosine-3'-phosphate
  modified_base 4: mod_base = OTHER; note = 2'-O-methylguanosine-3'-phosphate
  modified_base 5: mod_base = OTHER; note = 2'-O-methylcytidine-3'-phosphate
  modified_base 6: mod_base = OTHER; note = 2'-O-methyluridine-3'-phosphate
  modified_base 7: mod_base = OTHER; note = 2'-fluoroguanosine-3'-phosphate
  modified_base 8: mod_base = OTHER; note = 2'-O-methyladenosine-3'-phosphate
  modified_base 9: mod_base = OTHER; note = 2'-fluorocytidine-3'-phosphate
  modified_base 10: mod_base = OTHER; note = 2'-fluorocytidine-3'-phosphate
  modified_base 11: mod_base = OTHER; note = 2'-fluoroadenosine-3'-phosphate
  modified_base 12: mod_base = OTHER; note = 2'-O-methylguanosine-3'-phosphate
  modified_base 13: mod_base = OTHER; note = 2'-O-methylcytidine-3'-phosphate
  modified_base 14: mod_base = OTHER; note = 2'-O-methyluridine-3'-phosphate
  modified_base 15: mod_base = OTHER; note = 2'-O-methylcytidine-3'-phosphate
  modified_base 16: mod_base = OTHER; note = 2'-O-methyluridine-3'-phosphate
  modified_base 17: mod_base = OTHER; note = 2'-O-methylcytidine-3'-phosphate
  modified_base 18: mod_base = OTHER; note = 2'-O-methyluridine-3'-phosphate
  modified_base 19: mod_base = OTHER; note = 2'-O-methylcytidine-3'-phosphorothioate
  modified_base 20: mod_base = OTHER; note = 2'-O-methyluridine-3'-phosphorothioate
  modified_base 21: mod_base = OTHER; note = 2'-O-methyladenosine-3'-phosphate
tgagctgaccagctctctcta

SEQ ID NO: 957 - RNA, 21 nt, synthetic construct
  source 1..21: mol_type = other RNA
  modified_base 1: mod_base = OTHER; note = 2'-O-methylguanosine-3'-phosphorothioate
  modified_base 2: mod_base = OTHER; note = 2'-O-methyladenosine-3'-phosphorothioate
  modified_base 3: mod_base = OTHER; note = 2'-O-methylguanosine-3'-phosphate
  modified_base 4: mod_base = OTHER; note = 2'-O-methylcytidine-3'-phosphate
  modified_base 5: mod_base = OTHER; note = 2'-O-methylcytidine-3'-phosphate
  modified_base 6: mod_base = OTHER; note = 2'-O-methyladenosine-3'-phosphate
  modified_base 7: mod_base = OTHER; note = 2'-fluoroadenosine-3'-phosphate
  modified_base 8: mod_base = OTHER; note = 2'-O-methyluridine-3'-phosphate
  modified_base 9: mod_base = OTHER; note = 2'-fluoroguanosine-3'-phosphate
  modified_base 10: mod_base = OTHER; note = 2'-fluoroguanosine-3'-phosphate
  modified_base 11: mod_base = OTHER; note = 2'-fluorocytidine-3'-phosphate
  modified_base 12: mod_base = OTHER; note = 2'-O-methyluridine-3'-phosphate
  modified_base 13: mod_base = OTHER; note = 2'-O-methyluridine-3'-phosphate
  modified_base 14: mod_base = OTHER; note = 2'-O-methylguanosine-3'-phosphate
  modified_base 15: mod_base = OTHER; note = 2'-O-methylguanosine-3'-phosphate
  modified_base 16: mod_base = OTHER; note = 2'-O-methyladenosine-3'-phosphate
  modified_base 17: mod_base = OTHER; note = 2'-O-methyladenosine-3'-phosphate
  modified_base 18: mod_base = OTHER; note = 2'-O-methyluridine-3'-phosphate
  modified_base 19: mod_base = OTHER; note = 2'-O-methylguanosine-3'-phosphorothioate
  modified_base 20: mod_base = OTHER; note = 2'-O-methyladenosine-3'-phosphorothioate
  modified_base 21: mod_base = OTHER; note = 2'-O-methyladenosine-3'-phosphate
gagccaatggcttggaatgaa

SEQ ID NO: 958 - RNA, 21 nt, synthetic construct
  source 1..21: mol_type = other RNA
  modified_base 1: mod_base = OTHER; note = 2'-O-methylcytidine-3'-phosphorothioate
  modified_base 2: mod_base = OTHER; note = 2'-O-methyluridine-3'-phosphorothioate
  modified_base 3: mod_base = OTHER; note = 2'-O-methylguanosine-3'-phosphate
  modified_base 4: mod_base = OTHER; note = 2'-O-methyladenosine-3'-phosphate
  modified_base 5: mod_base = OTHER; note = 2'-O-methyluridine-3'-phosphate
  modified_base 6: mod_base = OTHER; note = 2'-O-methylcytidine-3'-phosphate
  modified_base 7: mod_base = OTHER; note = 2'-fluorouridine-3'-phosphate
  modified_base 8: mod_base = OTHER; note = 2'-O-methyluridine-3'-phosphate
  modified_base 9: mod_base = OTHER; note = 2'-fluoroguanosine-3'-phosphate
  modified_base 10: mod_base = OTHER; note = 2'-fluoroguanosine-3'-phosphate
  modified_base 11: mod_base = OTHER; note = 2'-fluoroadenosine-3'-phosphate
  modified_base 12: mod_base = OTHER; note = 2'-O-methylcytidine-3'-phosphate
  modified_base 13: mod_base = OTHER; note = 2'-O-methyluridine-3'-phosphate
  modified_base 14: mod_base = OTHER; note = 2'-O-methyluridine-3'-phosphate
  modified_base 15: mod_base = OTHER; note = 2'-O-methylguanosine-3'-phosphate
  modified_base 16: mod_base = OTHER; note = 2'-O-methyladenosine-3'-phosphate
  modified_base 17: mod_base = OTHER; note = 2'-O-methyluridine-3'-phosphate
  modified_base 18: mod_base = OTHER; note = 2'-O-methyladenosine-3'-phosphate
  modified_base 19: mod_base = OTHER; note = 2'-O-methyluridine-3'-phosphorothioate
  modified_base 20: mod_base = OTHER; note = 2'-O-methyluridine-3'-phosphorothioate
  modified_base 21: mod_base = OTHER; note = 2'-O-methyladenosine-3'-phosphate
ctgatcttggacttgatatta

SEQ ID NO: 959 - RNA, 21 nt, synthetic construct
  source 1..21: mol_type = other RNA
  modified_base 1: mod_base = OTHER; note = 2'-O-methyluridine-3'-phosphorothioate
  modified_base 2: mod_base = OTHER; note = 2'-O-methylguanosine-3'-phosphorothioate
  modified_base 3: mod_base = OTHER; note = 2'-O-methylguanosine-3'-phosphate
  modified_base 4: mod_base = OTHER; note = 2'-O-methyluridine-3'-phosphate
  modified_base 5: mod_base = OTHER; note = 2'-O-methyluridine-3'-phosphate
  modified_base 6: mod_base = OTHER; note = 2'-O-methyluridine-3'-phosphate
  modified_base 7: mod_base = OTHER; note = 2'-fluoroguanosine-3'-phosphate
  modified_base 8: mod_base = OTHER; note = 2'-O-methyladenosine-3'-phosphate
  modified_base 9: mod_base = OTHER; note = 2'-fluorouridine-3'-phosphate
  modified_base 10: mod_base = OTHER; note = 2'-fluoroadenosine-3'-phosphate
  modified_base 11: mod_base = OTHER; note = 2'-fluorocytidine-3'-phosphate
  modified_base 12: mod_base = OTHER; note = 2'-O-methyluridine-3'-phosphate
  modified_base 13: mod_base = OTHER; note = 2'-O-methylguanosine-3'-phosphate
  modified_base 14: mod_base = OTHER; note = 2'-O-methyladenosine-3'-phosphate
  modified_base 15: mod_base = OTHER; note = 2'-O-methylcytidine-3'-phosphate
  modified_base 16: mod_base = OTHER; note = 2'-O-methylcytidine-3'-phosphate
  modified_base 17: mod_base = OTHER; note = 2'-O-methyluridine-3'-phosphate
  modified_base 18: mod_base = OTHER; note = 2'-O-methylguanosine-3'-phosphate
  modified_base 19: mod_base = OTHER; note = 2'-O-methyluridine-3'-phosphorothioate
  modified_base 20: mod_base = OTHER; note = 2'-O-methyladenosine-3'-phosphorothioate
  modified_base 21: mod_base = OTHER; note = 2'-O-methyladenosine-3'-phosphate
tggtttgatactgacctgtaa

SEQ ID NO: 960 - RNA, 21 nt, synthetic construct
  source 1..21: mol_type = other RNA
  modified_base 1: mod_base = OTHER; note = 2'-O-methyluridine-3'-phosphorothioate
  modified_base 2: mod_base = OTHER; note = 2'-O-methyluridine-3'-phosphorothioate
  modified_base 3: mod_base = OTHER; note = 2'-O-methyluridine-3'-phosphate
  modified_base 4: mod_base = OTHER; note = 2'-O-methylguanosine-3'-phosphate
  modified_base 5: mod_base = OTHER; note = 2'-O-methyladenosine-3'-phosphate
  modified_base 6: mod_base = OTHER; note = 2'-O-methyluridine-3'-phosphate
  modified_base 7: mod_base = OTHER; note = 2'-fluoroadenosine-3'-phosphate
  modified_base 8: mod_base = OTHER; note = 2'-O-methylcytidine-3'-phosphate
  modified_base 9: mod_base = OTHER; note = 2'-fluorouridine-3'-phosphate
  modified_base 10: mod_base = OTHER; note = 2'-fluoroguanosine-3'-phosphate
  modified_base 11: mod_base = OTHER; note = 2'-fluoroadenosine-3'-phosphate
  modified_base 12: mod_base = OTHER; note = 2'-O-methylcytidine-3'-phosphate
  modified_base 13: mod_base = OTHER; note = 2'-O-methylcytidine-3'-phosphate
  modified_base 14: mod_base = OTHER; note = 2'-O-methyluridine-3'-phosphate
  modified_base 15: mod_base = OTHER; note = 2'-O-methylguanosine-3'-phosphate
  modified_base 16: mod_base = OTHER; note = 2'-O-methyluridine-3'-phosphate
  modified_base 17: mod_base = OTHER; note = 2'-O-methyladenosine-3'-phosphate
  modified_base 18: mod_base = OTHER; note = 2'-O-methyladenosine-3'-phosphate
  modified_base 19: mod_base = OTHER; note = 2'-O-methyladenosine-3'-phosphorothioate
  modified_base 20: mod_base = OTHER; note = 2'-O-methyluridine-3'-phosphorothioate
  modified_base 21: mod_base = OTHER; note = 2'-O-methyladenosine-3'-phosphate
tttgatactgacctgtaaata

SEQ ID NO: 961 - RNA, 21 nt, synthetic construct
  source 1..21: mol_type = other RNA
  modified_base 1: mod_base = OTHER; note = 2'-O-methylguanosine-3'-phosphorothioate
  modified_base 2: mod_base = OTHER; note = 2'-O-methylguanosine-3'-phosphorothioate
  modified_base 3: mod_base = OTHER; note = 2'-O-methylcytidine-3'-phosphate
  modified_base 4: mod_base = OTHER; note = 2'-O-methyluridine-3'-phosphate
  modified_base 5: mod_base = OTHER; note = 2'-O-methyladenosine-3'-phosphate
  modified_base 6: mod_base = OTHER; note = 2'-O-methyluridine-3'-phosphate
  modified_base 7: mod_base = OTHER; note = 2'-fluorouridine-3'-phosphate
  modified_base 8: mod_base = OTHER; note = 2'-O-methyluridine-3'-phosphate
  modified_base 9: mod_base = OTHER; note = 2'-fluoroguanosine-3'-phosphate
  modified_base 10: mod_base = OTHER; note = 2'-fluorouridine-3'-phosphate
  modified_base 11: mod_base = OTHER; note = 2'-fluoroadenosine-3'-phosphate
  modified_base 12: mod_base = OTHER; note = 2'-O-methyladenosine-3'-phosphate
  modified_base 13: mod_base = OTHER; note = 2'-O-methyladenosine-3'-phosphate
  modified_base 14: mod_base = OTHER; note = 2'-O-methyluridine-3'-phosphate
  modified_base 15: mod_base = OTHER; note = 2'-O-methylcytidine-3'-phosphate
  modified_base 16: mod_base = OTHER; note = 2'-O-methyluridine-3'-phosphate
  modified_base 17: mod_base = OTHER; note = 2'-O-methylguanosine-3'-phosphate
  modified_base 18: mod_base = OTHER; note = 2'-O-methylcytidine-3'-phosphate
  modified_base 19: mod_base = OTHER; note = 2'-O-methylcytidine-3'-phosphorothioate
  modified_base 20: mod_base = OTHER; note = 2'-O-methyladenosine-3'-phosphorothioate
  modified_base 21: mod_base = OTHER; note = 2'-O-methyladenosine-3'-phosphate
ggctatttgtaaatctgccaa

SEQ ID NO: 962 - RNA, 21 nt, synthetic construct
  source 1..21: mol_type = other RNA
  modified_base 1: mod_base = OTHER; note = 2'-O-methyluridine-3'-phosphorothioate
  modified_base 2: mod_base = OTHER; note = 2'-O-methyluridine-3'-phosphorothioate
  modified_base 3: mod_base = OTHER; note = 2'-O-methyluridine-3'-phosphate
  modified_base 4: mod_base = OTHER; note = 2'-O-methylcytidine-3'-phosphate
  modified_base 5: mod_base = OTHER; note = 2'-O-methyluridine-3'-phosphate
  modified_base 6: mod_base = OTHER; note = 2'-O-methylguanosine-3'-phosphate
  modified_base 7: mod_base = OTHER; note = 2'-fluoroguanosine-3'-phosphate
  modified_base 8: mod_base = OTHER; note = 2'-O-methyluridine-3'-phosphate
  modified_base 9: mod_base = OTHER; note = 2'-fluorouridine-3'-phosphate
  modified_base 10: mod_base = OTHER; note = 2'-fluoroguanosine-3'-phosphate
  modified_base 11: mod_base = OTHER; note = 2'-fluorouridine-3'-phosphate
  modified_base 12: mod_base = OTHER; note = 2'-O-methyluridine-3'-phosphate
  modified_base 13: mod_base = OTHER; note = 2'-O-methyladenosine-3'-phosphate
  modified_base 14: mod_base = OTHER; note = 2'-O-methyluridine-3'-phosphate
  modified_base 15: mod_base = OTHER; note = 2'-O-methylguanosine-3'-phosphate
  modified_base 16: mod_base = OTHER; note = 2'-O-methyluridine-3'-phosphate
  modified_base 17: mod_base = OTHER; note = 2'-O-methylguanosine-3'-phosphate
  modified_base 18: mod_base = OTHER; note = 2'-O-methyladenosine-3'-phosphate
  modified_base 19: mod_base = OTHER; note = 2'-O-methyluridine-3'-phosphorothioate
  modified_base 20: mod_base = OTHER; note = 2'-O-methylcytidine-3'-phosphorothioate
  modified_base 21: mod_base = OTHER; note = 2'-O-methyladenosine-3'-phosphate
tttctggttgttatgtgatca

SEQ ID NO: 963 - RNA, 21 nt, synthetic construct
  source 1..21: mol_type = other RNA
  modified_base 1: mod_base = OTHER; note = 2'-O-methylguanosine-3'-phosphorothioate
  modified_base 2: mod_base = OTHER; note = 2'-O-methyladenosine-3'-phosphorothioate
  modified_base 3: mod_base = OTHER; note = 2'-O-methyluridine-3'-phosphate
  modified_base 4: mod_base = OTHER; note = 2'-O-methylcytidine-3'-phosphate
  modified_base 5: mod_base = OTHER; note = 2'-O-methyladenosine-3'-phosphate
  modified_base 6: mod_base = OTHER; note = 2'-O-methyluridine-3'-phosphate
  modified_base 7: mod_base = OTHER; note = 2'-fluoroguanosine-3'-phosphate
  modified_base 8: mod_base = OTHER; note = 2'-O-methyluridine-3'-phosphate
  modified_base 9: mod_base = OTHER; note = 2'-fluoroguanosine-3'-phosphate
  modified_base 10: mod_base = OTHER; note = 2'-fluorouridine-3'-phosphate
  modified_base 11: mod_base = OTHER; note = 2'-fluoroguanosine-3'-phosphate
  modified_base 12: mod_base = OTHER; note = 2'-O-methylguanosine-3'-phosphate
  modified_base 13: mod_base = OTHER; note = 2'-O-methyladenosine-3'-phosphate
  modified_base 14: mod_base = OTHER; note = 2'-O-methyladenosine-3'-phosphate
  modified_base 15: mod_base = OTHER; note = 2'-O-methylguanosine-3'-phosphate
  modified_base 16: mod_base = OTHER; note = 2'-O-methyluridine-3'-phosphate
  modified_base 17: mod_base = OTHER; note = 2'-O-methyluridine-3'-phosphate
  modified_base 18: mod_base = OTHER; note = 2'-O-methyladenosine-3'-phosphate
  modified_base 19: mod_base = OTHER; note = 2'-O-methyluridine-3'-phosphorothioate
  modified_base 20: mod_base = OTHER; note = 2'-O-methyluridine-3'-phosphorothioate
  modified_base 21: mod_base = OTHER; note = 2'-O-methyladenosine-3'-phosphate
gatcatgtgtggaagttatta

SEQ ID NO: 964 - RNA, 21 nt, synthetic construct
  source 1..21: mol_type = other RNA
  modified_base 1: mod_base = OTHER; note = 2'-O-methyluridine-3'-phosphorothioate
  modified_base 2: mod_base = OTHER; note = 2'-O-methyladenosine-3'-phosphorothioate
  modified_base 3: mod_base = OTHER; note = 2'-O-methyladenosine-3'-phosphate
  modified_base 4: mod_base = OTHER; note = 2'-O-methyluridine-3'-phosphate
  modified_base 5: mod_base = OTHER; note = 2'-O-methyladenosine-3'-phosphate
  modified_base 6: mod_base = OTHER; note = 2'-O-methylcytidine-3'-phosphate
  modified_base 7: mod_base = OTHER; note = 2'-fluorouridine-3'-phosphate
  modified_base 8: mod_base = OTHER; note = 2'-O-methylcytidine-3'-phosphate
  modified_base 9: mod_base = OTHER; note = 2'-fluoroadenosine-3'-phosphate
  modified_base 10: mod_base = OTHER; note = 2'-fluoroadenosine-3'-phosphate
  modified_base 11: mod_base = OTHER; note = 2'-fluoroadenosine-3'-phosphate
  modified_base 12: mod_base = OTHER; note = 2'-O-methyluridine-3'-phosphate
  modified_base 13: mod_base = OTHER; note = 2'-O-methylguanosine-3'-phosphate
  modified_base 14: mod_base = OTHER; note = 2'-O-methyladenosine-3'-phosphate
  modified_base 15: mod_base = OTHER; note = 2'-O-methylguanosine-3'-phosphate
  modified_base 16: mod_base = OTHER; note = 2'-O-methyluridine-3'-phosphate
  modified_base 17: mod_base = OTHER; note = 2'-O-methyladenosine-3'-phosphate
  modified_base 18: mod_base = OTHER; note = 2'-O-methyladenosine-3'-phosphate
  modified_base 19: mod_base = OTHER; note = 2'-O-methylcytidine-3'-phosphorothioate
  modified_base 20: mod_base = OTHER; note = 2'-O-methyladenosine-3'-phosphorothioate
  modified_base 21: mod_base = OTHER; note = 2'-O-methyladenosine-3'-phosphate
taatactcaaatgagtaacaa

SEQ ID NO: 965 - RNA, 21 nt, synthetic construct
  source 1..21: mol_type = other RNA
  modified_base 1: mod_base = OTHER; note = 2'-O-methyladenosine-3'-phosphorothioate
  modified_base 2: mod_base = OTHER; note = 2'-O-methyluridine-3'-phosphorothioate
  modified_base 3: mod_base = OTHER; note = 2'-O-methyluridine-3'-phosphate
  modified_base 4: mod_base = OTHER; note = 2'-O-methylguanosine-3'-phosphate
  modified_base 5: mod_base = OTHER; note = 2'-O-methyluridine-3'-phosphate
  modified_base 6: mod_base = OTHER; note = 2'-O-methylcytidine-3'-phosphate
  modified_base 7: mod_base = OTHER; note = 2'-fluorouridine-3'-phosphate
  modified_base 8: mod_base = OTHER; note = 2'-O-methylguanosine-3'-phosphate
  modified_base 9: mod_base = OTHER; note = 2'-fluoroadenosine-3'-phosphate
  modified_base 10: mod_base = OTHER; note = 2'-fluoroadenosine-3'-phosphate
  modified_base 11: mod_base = OTHER; note = 2'-fluorocytidine-3'-phosphate
  modified_base 12: mod_base = OTHER; note = 2'-O-methyluridine-3'-phosphate
  modified_base 13: mod_base = OTHER; note = 2'-O-methyluridine-3'-phosphate
  modified_base 14: mod_base = OTHER; note = 2'-O-methylguanosine-3'-phosphate
  modified_base 15: mod_base = OTHER; note = 2'-O-methylcytidine-3'-phosphate
  modified_base 16: mod_base = OTHER; note = 2'-O-methyladenosine-3'-phosphate
  modified_base 17: mod_base = OTHER; note = 2'-O-methyluridine-3'-phosphate
  modified_base 18: mod_base = OTHER; note = 2'-O-methyluridine-3'-phosphate
  modified_base 19: mod_base = OTHER; note = 2'-O-methylguanosine-3'-phosphorothioate
  modified_base 20: mod_base = OTHER; note = 2'-O-methyluridine-3'-phosphorothioate
  modified_base 21: mod_base = OTHER; note = 2'-O-methyladenosine-3'-phosphate
attgtctgaacttgcattgta

SEQ ID NO: 966 - RNA, 21 nt, synthetic construct
  source 1..21: mol_type = other RNA
  modified_base 1: mod_base = OTHER; note = 2'-O-methylcytidine-3'-phosphorothioate
  modified_base 2: mod_base = OTHER; note = 2'-O-methyladenosine-3'-phosphorothioate
  modified_base 3: mod_base = OTHER; note = 2'-O-methylguanosine-3'-phosphate
  modified_base 4: mod_base = OTHER; note = 2'-O-methyladenosine-3'-phosphate
  modified_base 5: mod_base = OTHER; note = 2'-O-methyladenosine-3'-phosphate
  modified_base 6: mod_base = OTHER; note = 2'-O-methyladenosine-3'-phosphate
  modified_base 7: mod_base = OTHER; note = 2'-fluoroguanosine-3'-phosphate
  modified_base 8: mod_base = OTHER; note = 2'-O-methyluridine-3'-phosphate
  modified_base 9: mod_base = OTHER; note = 2'-fluoroguanosine-3'-phosphate
  modified_base 10: mod_base = OTHER; note = 2'-fluorocytidine-3'-phosphate
  modified_base 11: mod_base = OTHER; note = 2'-fluorocytidine-3'-phosphate
  modified_base 12: mod_base = OTHER; note = 2'-O-methyluridine-3'-phosphate
  modified_base 13: mod_base = OTHER; note = 2'-O-methylguanosine-3'-phosphate
  modified_base 14: mod_base = OTHER; note = 2'-O-methyladenosine-3'-phosphate
  modified_base 15: mod_base = OTHER; note = 2'-O-methylcytidine-3'-phosphate
  modified_base 16: mod_base = OTHER; note = 2'-O-methyladenosine-3'-phosphate
  modified_base 17: mod_base = OTHER; note = 2'-O-methylcytidine-3'-phosphate
  modified_base 18: mod_base = OTHER; note = 2'-O-methyladenosine-3'-phosphate
  modified_base 19: mod_base = OTHER; note = 2'-O-methylcytidine-3'-phosphorothioate
  modified_base 20: mod_base = OTHER; note = 2'-O-methyluridine-3'-phosphorothioate
  modified_base 21: mod_base = OTHER; note = 2'-O-methyladenosine-3'-phosphate
cagaaagtgcctgacacacta

SEQ ID NO: 967 - RNA, 21 nt, synthetic construct
  source 1..21: mol_type = other RNA
  modified_base 1: mod_base = OTHER; note = 2'-O-methylguanosine-3'-phosphorothioate
  modified_base 2: mod_base = OTHER; note = 2'-O-methyladenosine-3'-phosphorothioate
  modified_base 3: mod_base = OTHER; note = 2'-O-methyladenosine-3'-phosphate
  modified_base 4: mod_base = OTHER; note = 2'-O-methyladenosine-3'-phosphate
  modified_base 5: mod_base = OTHER; note = 2'-O-methylguanosine-3'-phosphate
  modified_base 6: mod_base = OTHER; note = 2'-O-methyluridine-3'-phosphate
  modified_base 7: mod_base = OTHER; note = 2'-fluoroguanosine-3'-phosphate
  modified_base 8: mod_base = OTHER; note = 2'-O-methylcytidine-3'-phosphate
  modified_base 9: mod_base = OTHER; note = 2'-fluorocytidine-3'-phosphate
  modified_base 10: mod_base = OTHER; note = 2'-fluorouridine-3'-phosphate
  modified_base 11: mod_base = OTHER; note = 2'-fluoroguanosine-3'-phosphate
  modified_base 12: mod_base = OTHER; note = 2'-O-methyladenosine-3'-phosphate
  modified_base 13: mod_base = OTHER; note = 2'-O-methylcytidine-3'-phosphate
  modified_base 14: mod_base = OTHER; note = 2'-O-methyladenosine-3'-phosphate
  modified_base 15: mod_base = OTHER; note = 2'-O-methylcytidine-3'-phosphate
  modified_base 16: mod_base = OTHER; note = 2'-O-methyladenosine-3'-phosphate
  modified_base 17: mod_base = OTHER; note = 2'-O-methylcytidine-3'-phosphate
  modified_base 18: mod_base = OTHER; note = 2'-O-methyluridine-3'-phosphate
  modified_base 19: mod_base = OTHER; note = 2'-O-methyladenosine-3'-phosphorothioate
  modified_base 20: mod_base = OTHER; note = 2'-O-methyladenosine-3'-phosphorothioate
  modified_base 21: mod_base = OTHER; note = 2'-O-methyladenosine-3'-phosphate
gaaagtgcctgacacactaaa

SEQ ID NO: 968 - RNA, 21 nt, synthetic construct
  source 1..21: mol_type = other RNA
  modified_base 1: mod_base = OTHER; note = 2'-O-methylguanosine-3'-phosphorothioate
  modified_base 2: mod_base = OTHER; note = 2'-O-methylcytidine-3'-phosphorothioate
  modified_base 3: mod_base = OTHER; note = 2'-O-methylcytidine-3'-phosphate
  modified_base 4: mod_base = OTHER; note = 2'-O-methyluridine-3'-phosphate
  modified_base 5: mod_base = OTHER; note = 2'-O-methylguanosine-3'-phosphate
  modified_base 6: mod_base = OTHER; note = 2'-O-methyladenosine-3'-phosphate
  modified_base 7: mod_base = OTHER; note = 2'-fluorocytidine-3'-phosphate
  modified_base 8: mod_base = OTHER; note = 2'-O-methyladenosine-3'-phosphate
  modified_base 9: mod_base = OTHER; note = 2'-fluorocytidine-3'-phosphate
  modified_base 10: mod_base = OTHER; note = 2'-fluoroadenosine-3'-phosphate
  modified_base 11: mod_base = OTHER; note = 2'-fluorocytidine-3'-phosphate
  modified_base 12: mod_base = OTHER; note = 2'-O-methyluridine-3'-phosphate
  modified_base 13: mod_base = OTHER; note = 2'-O-methyladenosine-3'-phosphate
  modified_base 14: mod_base = OTHER; note = 2'-O-methyladenosine-3'-phosphate
  modified_base 15: mod_base = OTHER; note = 2'-O-methylcytidine-3'-phosphate
  modified_base 16: mod_base = OTHER; note = 2'-O-methylcytidine-3'-phosphate
  modified_base 17: mod_base = OTHER; note = 2'-O-methyladenosine-3'-phosphate
  modified_base 18: mod_base = OTHER; note = 2'-O-methyladenosine-3'-phosphate
  modified_base 19: mod_base = OTHER; note = 2'-O-methylguanosine-3'-phosphorothioate
  modified_base 20: mod_base = OTHER; note = 2'-O-methylcytidine-3'-phosphorothioate
  modified_base 21: mod_base = OTHER; note = 2'-O-methyladenosine-3'-phosphate
gcctgacacactaaccaagca

SEQ ID NO: 969 - RNA, 21 nt, synthetic construct
  source 1..21: mol_type = other RNA
  modified_base 1: mod_base = OTHER; note = 2'-O-methyluridine-3'-phosphorothioate
  modified_base 2: mod_base = OTHER; note = 2'-O-methylguanosine-3'-phosphorothioate
  modified_base 3: mod_base = OTHER; note = 2'-O-methylguanosine-3'-phosphate
  modified_base 4: mod_base = OTHER; note = 2'-O-methylguanosine-3'-phosphate
  modified_base 5: mod_base = OTHER; note = 2'-O-methyladenosine-3'-phosphate
  modified_base 6: mod_base = OTHER; note = 2'-O-methyladenosine-3'-phosphate
  modified_base 7: mod_base = OTHER; note = 2'-fluorocytidine-3'-phosphate
  modified_base 8: mod_base = OTHER; note = 2'-O-methyladenosine-3'-phosphate
  modified_base 9: mod_base = OTHER; note = 2'-fluoroadenosine-3'-phosphate
  modified_base 10: mod_base = OTHER; note = 2'-fluorouridine-3'-phosphate
  modified_base 11: mod_base = OTHER; note = 2'-fluorouridine-3'-phosphate
  modified_base 12: mod_base = OTHER; note = 2'-O-methylguanosine-3'-phosphate
  modified_base 13: mod_base = OTHER; note = 2'-O-methyladenosine-3'-phosphate
  modified_base 14: mod_base = OTHER; note = 2'-O-methyladenosine-3'-phosphate
  modified_base 15: mod_base = OTHER; note = 2'-O-methylguanosine-3'-phosphate
  modified_base 16: mod_base = OTHER; note = 2'-O-methyluridine-3'-phosphate
  modified_base 17: mod_base = OTHER; note = 2'-O-methyladenosine-3'-phosphate
  modified_base 18: mod_base = OTHER; note = 2'-O-methyladenosine-3'-phosphate
  modified_base 19: mod_base = OTHER; note = 2'-O-methyladenosine-3'-phosphorothioate
  modified_base 20: mod_base = OTHER; note = 2'-O-methylcytidine-3'-phosphorothioate
  modified_base 21: mod_base = OTHER; note = 2'-O-methyladenosine-3'-phosphate
tgggaacaattgaagtaaaca

SEQ ID NO: 970 - RNA, 21 nt, synthetic construct
  source 1..21: mol_type = other RNA
  modified_base 1: mod_base = OTHER; note = 2'-O-methyladenosine-3'-phosphorothioate
  modified_base 2: mod_base = OTHER; note = 2'-O-methyluridine-3'-phosphorothioate
  modified_base 3: mod_base = OTHER; note = 2'-O-methylguanosine-3'-phosphate
  modified_base 4: mod_base = OTHER; note = 2'-O-methylguanosine-3'-phosphate
  modified_base 5: mod_base = OTHER; note = 2'-O-methyladenosine-3'-phosphate
  modified_base 6: mod_base = OTHER; note = 2'-O-methyluridine-3'-phosphate
  modified_base 7: mod_base = OTHER; note = 2'-fluorocytidine-3'-phosphate
  modified_base 8: mod_base = OTHER; note = 2'-O-methyladenosine-3'-phosphate
  modified_base 9: mod_base = OTHER; note = 2'-fluorocytidine-3'-phosphate
  modified_base 10: mod_base = OTHER; note = 2'-fluoroadenosine-3'-phosphate
  modified_base 11: mod_base = OTHER; note = 2'-fluoroadenosine-3'-phosphate
  modified_base 12: mod_base = OTHER; note = 2'-O-methylguanosine-3'-phosphate
  modified_base 13: mod_base = OTHER; note = 2'-O-methyladenosine-3'-phosphate
  modified_base 14: mod_base = OTHER; note = 2'-O-methyluridine-3'-phosphate
  modified_base 15: mod_base = OTHER; note = 2'-O-methylguanosine-3'-phosphate
  modified_base 16: mod_base = OTHER; note = 2'-O-methylguanosine-3'-phosphate
  modified_base 17: mod_base = OTHER; note = 2'-O-methyladenosine-3'-phosphate
  modified_base 18: mod_base = OTHER; note = 2'-O-methyladenosine-3'-phosphate
  modified_base 19: mod_base = OTHER; note = 2'-O-methyluridine-3'-phosphorothioate
  modified_base 20: mod_base = OTHER; note = 2'-O-methyluridine-3'-phosphorothioate
  modified_base 21: mod_base = OTHER; note = 2'-O-methyladenosine-3'-phosphate
atggatcacaagatggaatta

SEQ ID NO: 971 - RNA, 21 nt, synthetic construct
  source 1..21: mol_type = other RNA
  modified_base 1: mod_base = OTHER; note = 2'-O-methyluridine-3'-phosphorothioate
  modified_base 2: mod_base = OTHER; note = 2'-O-methyluridine-3'-phosphorothioate
  modified_base 3: mod_base = OTHER; note = 2'-O-methyluridine-3'-phosphate
  modified_base 4: mod_base = OTHER; note = 2'-O-methyladenosine-3'-phosphate
  modified_base 5: mod_base = OTHER; note = 2'-O-methyluridine-3'-phosphate
  modified_base 6: mod_base = OTHER; note = 2'-O-methylcytidine-3'-phosphate
  modified_base 7: mod_base = OTHER; note = 2'-fluoroadenosine-3'-phosphate
  modified_base 8: mod_base = OTHER; note = 2'-O-methyladenosine-3'-phosphate
  modified_base 9: mod_base = OTHER; note = 2'-fluoroadenosine-3'-phosphate
  modified_base 10: mod_base = OTHER; note = 2'-fluorocytidine-3'-phosphate
  modified_base 11: mod_base = OTHER; note = 2'-fluorocytidine-3'-phosphate
  modified_base 12: mod_base = OTHER; note = 2'-O-methylcytidine-3'-phosphate
  modified_base 13: mod_base = OTHER; note = 2'-O-methyluridine-3'-phosphate
  modified_base 14: mod_base = OTHER; note = 2'-O-methyladenosine-3'-phosphate
  modified_base 15: mod_base = OTHER; note = 2'-O-methylguanosine-3'-phosphate
  modified_base 16: mod_base = OTHER; note = 2'-O-methylcytidine-3'-phosphate
  modified_base 17: mod_base = OTHER; note = 2'-O-methylcytidine-3'-phosphate
  modified_base 18: mod_base = OTHER; note = 2'-O-methyluridine-3'-phosphate
  modified_base 19: mod_base = OTHER; note = 2'-O-methyluridine-3'-phosphorothioate
  modified_base 20: mod_base = OTHER; note = 2'-O-methylguanosine-3'-phosphorothioate
  modified_base 21: mod_base = OTHER; note = 2'-O-methyladenosine-3'-phosphate
tttatcaaaccctagccttga

SEQ ID NO: 972 - RNA, 21 nt, synthetic construct
  source 1..21: mol_type = other RNA
  modified_base 1: mod_base = OTHER; note = 2'-O-methyluridine-3'-phosphorothioate
  modified_base 2: mod_base = OTHER; note = 2'-O-methyladenosine-3'-phosphorothioate
  modified_base 3: mod_base = OTHER; note = 2'-O-methyluridine-3'-phosphate
  modified_base 4: mod_base = OTHER; note = 2'-O-methylcytidine-3'-phosphate
  modified_base 5: mod_base = OTHER; note = 2'-O-methyluridine-3'-phosphate
  modified_base 6: mod_base = OTHER; note = 2'-O-methylguanosine-3'-phosphate
  modified_base 7: mod_base = OTHER; note = 2'-fluorouridine-3'-phosphate
  modified_base 8: mod_base = OTHER; note = 2'-O-methyladenosine-3'-phosphate
  modified_base 9: mod_base = OTHER; note = 2'-fluoroadenosine-3'-phosphate
  modified_base 10: mod_base = OTHER; note = 2'-fluorouridine-3'-phosphate
  modified_base 11: mod_base = OTHER; note = 2'-fluoroguanosine-3'-phosphate
  modified_base 12: mod_base = OTHER; note = 2'-O-methylguanosine-3'-phosphate
  modified_base 13: mod_base = OTHER; note = 2'-O-methyluridine-3'-phosphate
  modified_base 14: mod_base = OTHER; note = 2'-O-methyladenosine-3'-phosphate
  modified_base 15: mod_base = OTHER; note = 2'-O-methylcytidine-3'-phosphate
  modified_base 16: mod_base = OTHER; note = 2'-O-methyluridine-3'-phosphate
  modified_base 17: mod_base = OTHER; note = 2'-O-methylguanosine-3'-phosphate
  modified_base 18: mod_base = OTHER; note = 2'-O-methyladenosine-3'-phosphate
  modified_base 19: mod_base = OTHER; note = 2'-O-methylcytidine-3'-phosphorothioate
  modified_base 20: mod_base = OTHER; note = 2'-O-methyluridine-3'-phosphorothioate
  modified_base 21: mod_base = OTHER; note = 2'-O-methyladenosine-3'-phosphate
tatctgtaatggtactgacta

SEQ ID NO: 973 - RNA, 21 nt, synthetic construct
  source 1..21: mol_type = other RNA
  modified_base 1: mod_base = OTHER; note = 2'-O-methyluridine-3'-phosphorothioate
  modified_base 2: mod_base = OTHER; note = 2'-O-methyluridine-3'-phosphorothioate
  modified_base 3: mod_base = OTHER; note = 2'-O-methylguanosine-3'-phosphate
  modified_base 4: mod_base = OTHER; note = 2'-O-methylcytidine-3'-phosphate
  modified_base 5: mod_base = OTHER; note = 2'-O-methyluridine-3'-phosphate
  modified_base 6: mod_base = OTHER; note = 2'-O-methyluridine-3'-phosphate
  modified_base 7: mod_base = OTHER; note = 2'-fluoroguanosine-3'-phosphate
  modified_base 8: mod_base = OTHER; note = 2'-O-methylcytidine-3'-phosphate
  modified_base 9: mod_base = OTHER; note = 2'-fluorouridine-3'-phosphate
  modified_base 10: mod_base = OTHER; note = 2'-fluorouridine-3'-phosphate
  modified_base 11: mod_base = OTHER; note = 2'-fluorouridine-3'-phosphate
  modified_base 12: mod_base = OTHER; note = 2'-O-methylguanosine-3'-phosphate
  modified_base 13: mod_base = OTHER; note = 2'-O-methyladenosine-3'-phosphate
  modified_base 14: mod_base = OTHER; note = 2'-O-methyladenosine-3'-phosphate
  modified_base 15: mod_base = OTHER; note = 2'-O-methylguanosine-3'-phosphate
  modified_base 16: mod_base = OTHER; note = 2'-O-methyluridine-3'-phosphate
  modified_base 17: mod_base = OTHER; note = 2'-O-methyladenosine-3'-phosphate
  modified_base 18: mod_base = OTHER; note = 2'-O-methylguanosine-3'-phosphate
  modified_base 19: mod_base = OTHER; note = 2'-O-methylcytidine-3'-phosphorothioate
  modified_base 20: mod_base = OTHER; note = 2'-O-methyluridine-3'-phosphorothioate
  modified_base 21: mod_base = OTHER; note = 2'-O-methyladenosine-3'-phosphate
ttgcttgctttgaagtagcta

SEQ ID NO: 974 - RNA, 21 nt, synthetic construct
  source 1..21: mol_type = other RNA
  modified_base 1: mod_base = OTHER; note = 2'-O-methyladenosine-3'-phosphorothioate
  modified_base 2: mod_base = OTHER; note = 2'-O-methylguanosine-3'-phosphorothioate
  modified_base 3: mod_base = OTHER; note = 2'-O-methyluridine-3'-phosphate
  modified_base 4: mod_base = OTHER; note = 2'-O-methylguanosine-3'-phosphate
  modified_base 5: mod_base = OTHER; note = 2'-O-methyluridine-3'-phosphate
  modified_base 6: mod_base = OTHER; note = 2'-O-methyluridine-3'-phosphate
  modified_base 7: mod_base = OTHER; note = 2'-fluoroadenosine-3'-phosphate
  modified_base 8: mod_base = OTHER; note = 2'-O-methyladenosine-3'-phosphate
  modified_base 9: mod_base = OTHER; note = 2'-fluoroguanosine-3'-phosphate
  modified_base 10: mod_base = OTHER; note = 2'-fluorouridine-3'-phosphate
  modified_base 11: mod_base = OTHER; note = 2'-fluorouridine-3'-phosphate
  modified_base 12: mod_base = OTHER; note = 2'-O-methyladenosine-3'-phosphate
  modified_base 13: mod_base = OTHER; note = 2'-O-methyluridine-3'-phosphate
  modified_base 14: mod_base = OTHER; note = 2'-O-methyladenosine-3'-phosphate
  modified_base 15: mod_base = OTHER; note = 2'-O-methylguanosine-3'-phosphate
  modified_base 16: mod_base = OTHER; note = 2'-O-methyluridine-3'-phosphate
  modified_base 17: mod_base = OTHER; note = 2'-O-methylguanosine-3'-phosphate
  modified_base 18: mod_base = OTHER; note = 2'-O-methyladenosine-3'-phosphate
  modified_base 19: mod_base = OTHER; note = 2'-O-methyladenosine-3'-phosphorothioate
  modified_base 20: mod_base = OTHER; note = 2'-O-methyluridine-3'-phosphorothioate
  modified_base 21: mod_base = OTHER; note = 2'-O-methyladenosine-3'-phosphate
agtgttaagttatagtgaata

SEQ ID NO: 975 - RNA, 21 nt, synthetic construct
  source 1..21: mol_type = other RNA
  modified_base 1: mod_base = OTHER; note = 2'-O-methyluridine-3'-phosphorothioate
  modified_base 2: mod_base = OTHER; note = 2'-O-methylguanosine-3'-phosphorothioate
  modified_base 3: mod_base = OTHER; note = 2'-O-methyluridine-3'-phosphate
  modified_base 4: mod_base = OTHER; note = 2'-O-methyluridine-3'-phosphate
  modified_base 5: mod_base = OTHER; note = 2'-O-methyladenosine-3'-phosphate
  modified_base 6: mod_base = OTHER; note = 2'-O-methyladenosine-3'-phosphate
  modified_base 7: mod_base = OTHER; note = 2'-fluoroguanosine-3'-phosphate
  modified_base 8: mod_base = OTHER; note = 2'-O-methyluridine-3'-phosphate
  modified_base 9: mod_base = OTHER; note = 2'-fluorouridine-3'-phosphate
  modified_base 10: mod_base = OTHER; note = 2'-fluoroadenosine-3'-phosphate
  modified_base 11: mod_base = OTHER; note = 2'-fluorouridine-3'-phosphate
  modified_base 12: mod_base = OTHER; note = 2'-O-methyladenosine-3'-phosphate
  modified_base 13: mod_base = OTHER; note = 2'-O-methylguanosine-3'-phosphate
  modified_base 14: mod_base = OTHER; note = 2'-O-methyluridine-3'-phosphate
  modified_base 15: mod_base = OTHER; note = 2'-O-methylguanosine-3'-phosphate
  modified_base 16: mod_base = OTHER; note = 2'-O-methyladenosine-3'-phosphate
  modified_base 17: mod_base = OTHER; note = 2'-O-methyladenosine-3'-phosphate
  modified_base 18: mod_base = OTHER; note = 2'-O-methyluridine-3'-phosphate
  modified_base 19: mod_base = OTHER; note = 2'-O-methyladenosine-3'-phosphorothioate
  modified_base 20: mod_base = OTHER; note = 2'-O-methylcytidine-3'-phosphorothioate
  modified_base 21: mod_base = OTHER; note = 2'-O-methyladenosine-3'-phosphate
tgttaagttatagtgaataca

SEQ ID NO: 976 - RNA, 21 nt, synthetic construct
  source 1..21: mol_type = other RNA
  modified_base 1: mod_base = OTHER; note = 2'-O-methylguanosine-3'-phosphorothioate
  modified_base 2: mod_base = OTHER; note = 2'-O-methyluridine-3'-phosphorothioate
  modified_base 3: mod_base = OTHER; note = 2'-O-methyladenosine-3'-phosphate
  modified_base 4: mod_base = OTHER; note = 2'-O-methyladenosine-3'-phosphate
  modified_base 5: mod_base = OTHER; note = 2'-O-methyluridine-3'-phosphate
  modified_base 6: mod_base = OTHER; note = 2'-O-methylguanosine-3'-phosphate
  modified_base 7: mod_base = OTHER; note = 2'-fluoroguanosine-3'-phosphate
  modified_base 8: mod_base = OTHER; note = 2'-O-methyluridine-3'-phosphate
  modified_base 9: mod_base = OTHER; note = 2'-fluoroguanosine-3'-phosphate
  modified_base 10: mod_base = OTHER; note = 2'-fluorouridine-3'-phosphate
  modified_base 11: mod_base = OTHER; note = 2'-fluoroadenosine-3'-phosphate
  modified_base 12: mod_base = OTHER; note = 2'-O-methylguanosine-3'-phosphate
  modified_base 13: mod_base = OTHER; note = 2'-O-methyladenosine-3'-phosphate
  modified_base 14: mod_base = OTHER; note = 2'-O-methyladenosine-3'-phosphate
  modified_base 15: mod_base = OTHER; note = 2'-O-methylcytidine-3'-phosphate
  modified_base 16: mod_base = OTHER; note = 2'-O-methyladenosine-3'-phosphate
  modified_base 17: mod_base = OTHER; note = 2'-O-methylcytidine-3'-phosphate
  modified_base 18: mod_base = OTHER; note = 2'-O-methyluridine-3'-phosphate
  modified_base 19: mod_base = OTHER; note = 2'-O-methyladenosine-3'-phosphorothioate
  modified_base 20: mod_base = OTHER; note = 2'-O-methyladenosine-3'-phosphorothioate
  modified_base 21: mod_base = OTHER; note = 2'-O-methyladenosine-3'-phosphate
gtaatggtgtagaacactaaa

SEQ ID NO: 977 - RNA, 21 nt, synthetic construct
  source 1..21: mol_type = other RNA
  modified_base 1: mod_base = OTHER; note = 2'-O-methyladenosine-3'-phosphorothioate
  modified_base 2: mod_base = OTHER; note = 2'-O-methyladenosine-3'-phosphorothioate
  modified_base 3: mod_base = OTHER; note = 2'-O-methyluridine-3'-phosphate
  modified_base 4: mod_base = OTHER; note = 2'-O-methylguanosine-3'-phosphate
  modified_base 5: mod_base = OTHER; note = 2'-O-methylguanosine-3'-phosphate
  modified_base 6: mod_base = OTHER; note = 2'-O-methyluridine-3'-phosphate
  modified_base 7: mod_base = OTHER; note = 2'-fluoroguanosine-3'-phosphate
  modified_base 8: mod_base = OTHER; note = 2'-O-methyluridine-3'-phosphate
  modified_base 9: mod_base = OTHER; note = 2'-fluoroadenosine-3'-phosphate
  modified_base 10: mod_base = OTHER; note = 2'-fluoroguanosine-3'-phosphate
  modified_base 11: mod_base = OTHER; note = 2'-fluoroadenosine-3'-phosphate
  modified_base 12: mod_base = OTHER; note = 2'-O-methyladenosine-3'-phosphate
  modified_base 13: mod_base = OTHER; note = 2'-O-methylcytidine-3'-phosphate
  modified_base 14: mod_base = OTHER; note = 2'-O-methyladenosine-3'-phosphate
  modified_base 15: mod_base = OTHER; note = 2'-O-methylcytidine-3'-phosphate
  modified_base 16: mod_base = OTHER; note = 2'-O-methyluridine-3'-phosphate
  modified_base 17: mod_base = OTHER; note = 2'-O-methyladenosine-3'-phosphate
  modified_base 18: mod_base = OTHER; note = 2'-O-methyladenosine-3'-phosphate
  modified_base 19: mod_base = OTHER; note = 2'-O-methyluridine-3'-phosphorothioate
  modified_base 20: mod_base = OTHER; note = 2'-O-methyluridine-3'-phosphorothioate
  modified_base 21: mod_base = OTHER; note = 2'-O-methyladenosine-3'-phosphate
aatggtgtagaacactaatta

SEQ ID NO: 978 - RNA, 21 nt, synthetic construct
  source 1..21: mol_type = other RNA
  modified_base 1: mod_base = OTHER; note = 2'-O-methylcytidine-3'-phosphorothioate
  modified_base 2: mod_base = OTHER; note = 2'-O-methyluridine-3'-phosphorothioate
  modified_base 3: mod_base = OTHER; note = 2'-O-methyladenosine-3'-phosphate
  modified_base 4: mod_base = OTHER; note = 2'-O-methyladenosine-3'-phosphate
  modified_base 5: mod_base = OTHER; note = 2'-O-methyluridine-3'-phosphate
  modified_base 6: mod_base = OTHER; note = 2'-O-methyluridine-3'-phosphate
  modified_base 7: mod_base = OTHER; note = 2'-fluorocytidine-3'-phosphate
  modified_base 8: mod_base = OTHER; note = 2'-O-methyladenosine-3'-phosphate
  modified_base 9: mod_base = OTHER; note = 2'-fluorouridine-3'-phosphate
  modified_base 10: mod_base = OTHER; note = 2'-fluoroadenosine-3'-phosphate
  modified_base 11: mod_base = OTHER; note = 2'-fluoroadenosine-3'-phosphate
  modified_base 12: mod_base = OTHER; note = 2'-O-methyluridine-3'-phosphate
  modified_base 13: mod_base = OTHER; note = 2'-O-methylcytidine-3'-phosphate
  modified_base 14: mod_base = OTHER; note = 2'-O-methyladenosine-3'-phosphate
  modified_base 15: mod_base = OTHER; note = 2'-O-methylcytidine-3'-phosphate
  modified_base 16: mod_base = OTHER; note = 2'-O-methyluridine-3'-phosphate
  modified_base 17: mod_base = OTHER; note = 2'-O-methylcytidine-3'-phosphate
  modified_base 18: mod_base = OTHER; note = 2'-O-methyluridine-3'-phosphate
  modified_base 19: mod_base = OTHER; note = 2'-O-methyladenosine-3'-phosphorothioate
  modified_base 20: mod_base = OTHER; note = 2'-O-methyladenosine-3'-phosphorothioate
  modified_base 21: mod_base = OTHER; note = 2'-O-methyladenosine-3'-phosphate
ctaattcataatcactctaaa

SEQ ID NO: 979 - RNA, 21 nt, synthetic construct
  source 1..21: mol_type = other RNA
  modified_base 1: mod_base = OTHER; note = 2'-O-methyluridine-3'-phosphorothioate
  modified_base 2: mod_base = OTHER; note = 2'-O-methyluridine-3'-phosphorothioate
  modified_base 3: mod_base = OTHER; note = 2'-O-methyluridine-3'-phosphate
  modified_base 4: mod_base = OTHER; note = 2'-O-methylguanosine-3'-phosphate
  modified_base 5: mod_base = OTHER; note = 2'-O-methylguanosine-3'-phosphate
  modified_base 6: mod_base = OTHER; note = 2'-O-methylguanosine-3'-phosphate
  modified_base 7: mod_base = OTHER; note = 2'-fluoroadenosine-3'-phosphate
  modified_base 8: mod_base = OTHER; note = 2'-O-methyluridine-3'-phosphate
  modified_base 9: mod_base = OTHER; note = 2'-fluoroadenosine-3'-phosphate
  modified_base 10: mod_base = OTHER; note = 2'-fluorouridine-3'-phosphate
  modified_base 11: mod_base = OTHER; note = 2'-fluoroguanosine-3'-phosphate
  modified_base 12: mod_base = OTHER; note = 2'-O-methyluridine-3'-phosphate
  modified_base 13: mod_base = OTHER; note = 2'-O-methyladenosine-3'-phosphate
  modified_base 14: mod_base = OTHER; note = 2'-O-methyluridine-3'-phosphate
  modified_base 15: mod_base = OTHER; note = 2'-O-methylguanosine-3'-phosphate
  modified_base 16: mod_base = OTHER; note = 2'-O-methylguanosine-3'-phosphate
  modified_base 17: mod_base = OTHER; note = 2'-O-methylguanosine-3'-phosphate
  modified_base 18: mod_base = OTHER; note = 2'-O-methyluridine-3'-phosphate
  modified_base 19: mod_base = OTHER; note = 2'-O-methyladenosine-3'-phosphorothioate
  modified_base 20: mod_base = OTHER; note = 2'-O-methylguanosine-3'-phosphorothioate
  modified_base 21: mod_base = OTHER; note = 2'-O-methyladenosine-3'-phosphate
tttgggatatgtatgggtaga

SEQ ID NO: 980 - RNA, 21 nt, synthetic construct
  source 1..21: mol_type = other RNA
  modified_base 1: mod_base = OTHER; note = 2'-O-methylguanosine-3'-phosphorothioate
  modified_base 2: mod_base = OTHER; note = 2'-O-methylguanosine-3'-phosphorothioate
  modified_base 3: mod_base = OTHER; note = 2'-O-methylguanosine-3'-phosphate
  modified_base 4: mod_base = OTHER; note = 2'-O-methyluridine-3'-phosphate
  modified_base 5: mod_base = OTHER; note = 2'-O-methyladenosine-3'-phosphate
  modified_base 6: mod_base = OTHER; note = 2'-O-methyladenosine-3'-phosphate
  modified_base 7: mod_base = OTHER; note = 2'-fluoroadenosine-3'-phosphate
  modified_base 8: mod_base = OTHER; note = 2'-O-methyluridine-3'-phosphate
  modified_base 9: mod_base = OTHER; note = 2'-fluorocytidine-3'-phosphate
  modified_base 10: mod_base = OTHER; note = 2'-fluoroadenosine-3'-phosphate
  modified_base 11: mod_base = OTHER; note = 2'-fluoroguanosine-3'-phosphate
  modified_base 12: mod_base = OTHER; note = 2'-O-methyluridine-3'-phosphate
  modified_base 13: mod_base = OTHER; note = 2'-O-methyladenosine-3'-phosphate
  modified_base 14: mod_base = OTHER; note = 2'-O-methyladenosine-3'-phosphate
  modified_base 15: mod_base = OTHER; note = 2'-O-methylguanosine-3'-phosphate
  modified_base 16: mod_base = OTHER; note = 2'-O-methyladenosine-3'-phosphate
  modified_base 17: mod_base = OTHER; note = 2'-O-methylguanosine-3'-phosphate
  modified_base 18: mod_base = OTHER; note = 2'-O-methylguanosine-3'-phosphate
  modified_base 19: mod_base = OTHER; note = 2'-O-methyluridine-3'-phosphorothioate
  modified_base 20: mod_base = OTHER; note = 2'-O-methylguanosine-3'-phosphorothioate
  modified_base 21: mod_base = OTHER; note = 2'-O-methyladenosine-3'-phosphate
gggtaaatcagtaagaggtga

SEQ ID NO: 981 - RNA, 21 nt, synthetic construct
  source 1..21: mol_type = other RNA
  modified_base 1: mod_base = OTHER; note = 2'-O-methylguanosine-3'-phosphorothioate
  modified_base 2: mod_base = OTHER; note = 2'-O-methyluridine-3'-phosphorothioate
  modified_base 3: mod_base = OTHER; note = 2'-O-methyladenosine-3'-phosphate
  modified_base 4: mod_base = OTHER; note = 2'-O-methyladenosine-3'-phosphate
  modified_base 5: mod_base = OTHER; note = 2'-O-methyladenosine-3'-phosphate
  modified_base 6: mod_base = OTHER; note = 2'-O-methyluridine-3'-phosphate
  modified_base 7: mod_base = OTHER; note = 2'-fluorocytidine-3'-phosphate
  modified_base 8: mod_base = OTHER; note = 2'-O-methyladenosine-3'-phosphate
  modified_base 9: mod_base = OTHER; note = 2'-fluoroguanosine-3'-phosphate
  modified_base 10: mod_base = OTHER; note = 2'-fluorouridine-3'-phosphate
  modified_base 11: mod_base = OTHER; note = 2'-fluoroadenosine-3'-phosphate
  modified_base 12: mod_base = OTHER; note = 2'-O-methyladenosine-3'-phosphate
  modified_base 13: mod_base = OTHER; note = 2'-O-methylguanosine-3'-phosphate
  modified_base 14: mod_base = OTHER; note = 2'-O-methyladenosine-3'-phosphate
  modified_base 15: mod_base = OTHER; note = 2'-O-methylguanosine-3'-phosphate
  modified_base 16: mod_base = OTHER; note = 2'-O-methylguanosine-3'-phosphate
  modified_base 17: mod_base = OTHER; note = 2'-O-methyluridine-3'-phosphate
  modified_base 18: mod_base = OTHER; note = 2'-O-methylguanosine-3'-phosphate
  modified_base 19: mod_base = OTHER; note = 2'-O-methyluridine-3'-phosphorothioate
  modified_base 20: mod_base = OTHER; note = 2'-O-methyluridine-3'-phosphorothioate
  modified_base 21: mod_base = OTHER; note = 2'-O-methyladenosine-3'-phosphate
gtaaatcagtaagaggtgtta

SEQ ID NO: 982 - RNA, 21 nt, synthetic construct
  source 1..21: mol_type = other RNA
  modified_base 1: mod_base = OTHER; note = 2'-O-methyluridine-3'-phosphorothioate
  modified_base 2: mod_base = OTHER; note = 2'-O-methyladenosine-3'-phosphorothioate
  modified_base 3: mod_base = OTHER; note = 2'-O-methyladenosine-3'-phosphate
  modified_base 4: mod_base = OTHER; note = 2'-O-methyladenosine-3'-phosphate
  modified_base 5: mod_base = OTHER; note = 2'-O-methyluridine-3'-phosphate
  modified_base 6: mod_base = OTHER; note = 2'-O-methylcytidine-3'-phosphate
  modified_base 7: mod_base = OTHER; note = 2'-fluoroadenosine-3'-phosphate
  modified_base 8: mod_base = OTHER; note = 2'-O-methylguanosine-3'-phosphate
  modified_base 9: mod_base = OTHER; note = 2'-fluorouridine-3'-phosphate
  modified_base 10: mod_base = OTHER; note = 2'-fluoroadenosine-3'-phosphate
  modified_base 11: mod_base = OTHER; note = 2'-fluoroadenosine-3'-phosphate
  modified_base 12: mod_base = OTHER; note = 2'-O-methylguanosine-3'-phosphate
  modified_base 13: mod_base = OTHER; note = 2'-O-methyladenosine-3'-phosphate
  modified_base 14: mod_base = OTHER; note = 2'-O-methylguanosine-3'-phosphate
  modified_base 15: mod_base = OTHER; note = 2'-O-methylguanosine-3'-phosphate
  modified_base 16: mod_base = OTHER; note = 2'-O-methyluridine-3'-phosphate
  modified_base 17: mod_base = OTHER; note = 2'-O-methylguanosine-3'-phosphate
  modified_base 18: mod_base = OTHER; note = 2'-O-methyluridine-3'-phosphate
  modified_base 19: mod_base = OTHER; note = 2'-O-methyluridine-3'-phosphorothioate
  modified_base 20: mod_base = OTHER; note = 2'-O-methyladenosine-3'-phosphorothioate
  modified_base 21: mod_base = OTHER; note = 2'-O-methyladenosine-3'-phosphate
taaatcagtaagaggtgttaa

SEQ ID NO: 983 - RNA, 21 nt, synthetic construct
  source 1..21: mol_type = other RNA
  modified_base 1: mod_base = OTHER; note = 2'-O-methyladenosine-3'-phosphorothioate
  modified_base 2: mod_base = OTHER; note = 2'-O-methyladenosine-3'-phosphorothioate
  modified_base 3: mod_base = OTHER; note = 2'-O-methyluridine-3'-phosphate
  modified_base 4: mod_base = OTHER; note = 2'-O-methylcytidine-3'-phosphate
  modified_base 5: mod_base = OTHER; note = 2'-O-methyladenosine-3'-phosphate
  modified_base 6: mod_base = OTHER; note = 2'-O-methylguanosine-3'-phosphate
  modified_base 7: mod_base = OTHER; note = 2'-fluorouridine-3'-phosphate
  modified_base 8: mod_base = OTHER; note = 2'-O-methyladenosine-3'-phosphate
  modified_base 9: mod_base = OTHER; note = 2'-fluoroadenosine-3'-phosphate
  modified_base 10: mod_base = OTHER; note = 2'-fluoroguanosine-3'-phosphate
  modified_base 11: mod_base = OTHER; note = 2'-fluoroadenosine-3'-phosphate
  modified_base 12: mod_base = OTHER; note = 2'-O-methylguanosine-3'-phosphate
  modified_base 13: mod_base = OTHER; note = 2'-O-methylguanosine-3'-phosphate
  modified_base 14: mod_base = OTHER; note = 2'-O-methyluridine-3'-phosphate
  modified_base 15: mod_base = OTHER; note = 2'-O-methylguanosine-3'-phosphate
  modified_base 16: mod_base = OTHER; note = 2'-O-methyluridine-3'-phosphate
  modified_base 17: mod_base = OTHER; note = 2'-O-methyluridine-3'-phosphate
  modified_base 18: mod_base = OTHER; note = 2'-O-methyladenosine-3'-phosphate
  modified_base 19: mod_base = OTHER; note = 2'-O-methyluridine-3'-phosphorothioate
  modified_base 20: mod_base = OTHER; note = 2'-O-methyluridine-3'-phosphorothioate
  modified_base 21: mod_base = OTHER; note = 2'-O-methyladenosine-3'-phosphate
aatcagtaagaggtgttatta

SEQ ID NO: 984 - DNA, 23 bp, synthetic construct
  source 1..23: mol_type = other DNA
  modified_base 1: mod_base = OTHER; note = Vinyl-phosphonate-2'-O-methyluridine-3'-phosphate
  modified_base 2: mod_base = OTHER; note = 2'-fluoroguanosine-3'-phosphate
  modified_base 3: mod_base = OTHER; note = 2'-O-methylguanosine-3'-phosphate
  modified_base 4: mod_base = OTHER; note = 2'-O-methyluridine-3'-phosphate
  modified_base 6: mod_base = OTHER; note = 2'-O-methyluridine-3'-phosphate
  modified_base 7: mod_base = OTHER; note = Adenosine-glycol nucleic acid (GNA)
  modified_base 8: mod_base = OTHER; note = 2'-O-methylcytidine-3'-phosphate
  modified_base 9: mod_base = OTHER; note = 2'-O-methyluridine-3'-phosphate
  modified_base 10: mod_base = OTHER; note = 2'-O-methyluridine-3'-phosphate
  modified_base 11: mod_base = OTHER; note = 2'-O-methylcytidine-3'-phosphate
  modified_base 12: mod_base = OTHER; note = 2'-O-methyladenosine-3'-phosphate
  modified_base 13: mod_base = OTHER; note = 2'-O-methyladenosine-3'-phosphate
  modified_base 14: mod_base = OTHER; note = 2'-fluoroadenosine-3'-phosphate
  modified_base 15: mod_base = OTHER; note = 2'-O-methyluridine-3'-phosphate
  modified_base 16: mod_base = OTHER; note = 2'-fluoroadenosine-3'-phosphate
  modified_base 17: mod_base = OTHER; note = 2'-O-methylcytidine-3'-phosphate
  modified_base 18: mod_base = OTHER; note = 2'-O-methylcytidine-3'-phosphate
  modified_base 19: mod_base = OTHER; note = 2'-O-methylcytidine-3'-phosphate
  modified_base 20: mod_base = OTHER; note = 2'-O-methyluridine-3'-phosphate
  modified_base 21: mod_base = OTHER; note = 2'-O-methylcytidine-3'-phosphorothioate
  modified_base 22: mod_base = OTHER; note = 2'-O-methyladenosine-3'-phosphorothioate
  modified_base 23: mod_base = OTHER; note = 2'-O-methylguanosine-3'-phosphate
  misc_feature 1..4: note = RNA
  misc_feature 5: note = DNA
  misc_feature 6..23: note = RNA
tggtatacttcaaataccctcag

SEQ ID NO: 985 - DNA, 23 bp, synthetic construct
  source 1..23: mol_type = other DNA
  modified_base 1: mod_base = OTHER; note = Vinyl-phosphonate-2'-O-methyluridine-3'-phosphate
  modified_base 3: mod_base = OTHER; note = 2'-O-methylguanosine-3'-phosphate
  modified_base 4: mod_base = OTHER; note = 2'-O-methyluridine-3'-phosphate
  modified_base 6: mod_base = OTHER; note = 2'-O-methyluridine-3'-phosphate
  modified_base 8: mod_base = OTHER; note = 2'-O-methylcytidine-3'-phosphate
  modified_base 9: mod_base = OTHER; note = 2'-O-methyluridine-3'-phosphate
  modified_base 10: mod_base = OTHER; note = 2'-O-methyluridine-3'-phosphate
  modified_base 11: mod_base = OTHER; note = 2'-O-methylcytidine-3'-phosphate
  modified_base 13: mod_base = OTHER; note = 2'-O-methyladenosine-3'-phosphate
  modified_base 14: mod_base = OTHER; note = 2'-fluoroadenosine-3'-phosphate
  modified_base 15: mod_base = OTHER; note = 2'-O-methyluridine-3'-phosphate
  modified_base 16: mod_base = OTHER; note = 2'-O-methyladenosine-3'-phosphate
  modified_base 17: mod_base = OTHER; note = 2'-O-methylcytidine-3'-phosphate
  modified_base 18: mod_base = OTHER; note = 2'-O-methylcytidine-3'-phosphate
  modified_base 19: mod_base = OTHER; note = 2'-O-methylcytidine-3'-phosphate
  modified_base 20: mod_base = OTHER; note = 2'-O-methyluridine-3'-phosphate
  modified_base 21: mod_base = OTHER; note = 2'-O-methylcytidine-3'-phosphorothioate
  modified_base 22: mod_base = OTHER; note = 2'-O-methyladenosine-3'-phosphorothioate
  modified_base 23: mod_base = OTHER; note = 2'-O-methylguanosine-3'-phosphate
  misc_feature 1: note = RNA
  misc_feature 2: note = DNA
  misc_feature 3..4: note = RNA
  misc_feature 5: note = DNA
  misc_feature 6: note = RNA
  misc_feature 7: note = DNA
  misc_feature 8..11: note = RNA
  misc_feature 12: note = DNA
  misc_feature 13..23: note = RNA
tggtatacttcaaataccctcag

SEQ ID NO: 986 - DNA, 23 bp, synthetic construct
  source 1..23: mol_type = other DNA
  modified_base 1: mod_base = OTHER; note = Vinyl-phosphonate-2'-O-methyluridine-3'-phosphate
  modified_base 2: mod_base = OTHER; note = 2'-fluoroadenosine-3'-phosphate
  modified_base 3: mod_base = OTHER; note = 2'-O-methyluridine-3'-phosphate
  modified_base 4: mod_base = OTHER; note = 2'-O-methylguanosine-3'-phosphate
  modified_base 6: mod_base = OTHER; note = 2'-O-methyluridine-3'-phosphate
  modified_base 7: mod_base = OTHER; note = Adenosine-glycol nucleic acid (GNA)
  modified_base 8: mod_base = OTHER; note = 2'-O-methyluridine-3'-phosphate
  modified_base 9: mod_base = OTHER; note = 2'-O-methyladenosine-3'-phosphate
  modified_base 10: mod_base = OTHER; note = 2'-O-methylcytidine-3'-phosphate
  modified_base 11: mod_base = OTHER; note = 2'-O-methyluridine-3'-phosphate
  modified_base 12: mod_base = OTHER; note = 2'-O-methyluridine-3'-phosphate
  modified_base 13: mod_base = OTHER; note = 2'-O-methylcytidine-3'-phosphate
  modified_base 14: mod_base = OTHER; note = 2'-fluoroadenosine-3'-phosphate
  modified_base 15: mod_base = OTHER; note = 2'-O-methyladenosine-3'-phosphate
  modified_base 16: mod_base = OTHER; note = 2'-fluoroadenosine-3'-phosphate
  modified_base 17: mod_base = OTHER; note = 2'-O-methyluridine-3'-phosphate
  modified_base 18: mod_base = OTHER; note = 2'-O-methyladenosine-3'-phosphate
  modified_base 19: mod_base = OTHER; note = 2'-O-methylcytidine-3'-phosphate
  modified_base 20: mod_base = OTHER; note = 2'-O-methylcytidine-3'-phosphate
  modified_base 21: mod_base = OTHER; note = 2'-O-methylcytidine-3'-phosphorothioate
  modified_base 22: mod_base = OTHER; note = 2'-O-methyluridine-3'-phosphorothioate
  modified_base 23: mod_base = OTHER; note = 2'-O-methylcytidine-3'-phosphate
  misc_feature 1..4: note = RNA
  misc_feature 5: note = DNA
  misc_feature 6..23: note = RNA
tatggtatacttcaaataccctc

SEQ ID NO: 987 - DNA, 23 bp, synthetic construct
  source 1..23: mol_type = other DNA
  modified_base 1: mod_base = OTHER; note = Vinyl-phosphonate-2'-O-methyluridine-3'-phosphate
  modified_base 2: mod_base = OTHER; note = 2'-fluorouridine-3'-phosphate
  modified_base 3: mod_base = OTHER; note = 2'-O-methyladenosine-3'-phosphate
  modified_base 4: mod_base = OTHER; note = 2'-O-methyluridine-3'-phosphate
  modified_base 6: mod_base = OTHER; note = 2'-O-methylguanosine-3'-phosphate
  modified_base 7: mod_base = OTHER; note = Thymidine-glycol nucleic acid (GNA) S-Isomer
  modified_base 8: mod_base = OTHER; note = 2'-O-methyladenosine-3'-phosphate
  modified_base 9: mod_base = OTHER; note = 2'-O-methyluridine-3'-phosphate
  modified_base 10: mod_base = OTHER; note = 2'-O-methyladenosine-3'-phosphate
  modified_base 11: mod_base = OTHER; note = 2'-O-methylcytidine-3'-phosphate
  modified_base 12: mod_base = OTHER; note = 2'-O-methyluridine-3'-phosphate
  modified_base 13: mod_base = OTHER; note = 2'-O-methyluridine-3'-phosphate
  modified_base 14: mod_base = OTHER; note = 2'-fluorocytidine-3'-phosphate
  modified_base 15: mod_base = OTHER; note = 2'-O-methyladenosine-3'-phosphate
  modified_base 16: mod_base = OTHER; note = 2'-fluoroadenosine-3'-phosphate
  modified_base 17: mod_base = OTHER; note = 2'-O-methyladenosine-3'-phosphate
  modified_base 18: mod_base = OTHER; note = 2'-O-methyluridine-3'-phosphate
  modified_base 19: mod_base = OTHER; note = 2'-O-methyladenosine-3'-phosphate
  modified_base 20: mod_base = OTHER; note = 2'-O-methylcytidine-3'-phosphate
  modified_base 21: mod_base = OTHER; note = 2'-O-methylcytidine-3'-phosphorothioate
  modified_base 22: mod_base = OTHER; note = 2'-O-methylcytidine-3'-phosphorothioate
  modified_base 23: mod_base = OTHER; note = 2'-O-methyluridine-3'-phosphate
  misc_feature 1..4: note = RNA
  misc_feature 5: note = DNA
  misc_feature 6: note = RNA
  misc_feature 7: note = DNA
  misc_feature 8..23: note = RNA
ttatggtatacttcaaataccct

SEQ ID NO: 988 - DNA, 23 bp, synthetic construct
  source 1..23: mol_type = other DNA
  modified_base 1: mod_base = OTHER; note = Vinyl-phosphonate-2'-O-methyluridine-3'-phosphate
  modified_base 2: mod_base = OTHER; note = 2'-fluoroguanosine-3'-phosphate
  modified_base 3: mod_base = OTHER; note = 2'-O-methyluridine-3'-phosphate
  modified_base 4: mod_base = OTHER; note = 2'-O-methyluridine-3'-phosphate
  modified_base 6: mod_base = OTHER; note = 2'-O-methyluridine-3'-phosphate
  modified_base 7: mod_base = OTHER; note = Adenosine-glycol nucleic acid (GNA)
  modified_base 8: mod_base = OTHER; note = 2'-O-methyluridine-3'-phosphate
  modified_base 9: mod_base = OTHER; note = 2'-O-methylguanosine-3'-phosphate
  modified_base 10: mod_base = OTHER; note = 2'-O-methylguanosine-3'-phosphate
  modified_base 11: mod_base = OTHER; note = 2'-O-methyluridine-3'-phosphate
  modified_base 12: mod_base = OTHER; note = 2'-O-methyladenosine-3'-phosphate
  modified_base 13: mod_base = OTHER; note = 2'-O-methyluridine-3'-phosphate
  modified_base 14: mod_base = OTHER; note = 2'-fluoroadenosine-3'-phosphate
  modified_base 15: mod_base = OTHER; note = 2'-O-methylcytidine-3'-phosphate
  modified_base 16: mod_base = OTHER; note = 2'-fluorouridine-3'-phosphate
  modified_base 17: mod_base = OTHER; note = 2'-O-methyluridine-3'-phosphate
  modified_base 18: mod_base = OTHER; note = 2'-O-methylcytidine-3'-phosphate
  modified_base 19: mod_base = OTHER; note = 2'-O-methyladenosine-3'-phosphate
  modified_base 20: mod_base = OTHER; note = 2'-O-methyladenosine-3'-phosphate
  modified_base 21: mod_base = OTHER; note = 2'-O-methyladenosine-3'-phosphorothioate
  modified_base 22: mod_base = OTHER; note = 2'-O-methyluridine-3'-phosphorothioate
  modified_base 23: mod_base = OTHER; note = 2'-O-methyladenosine-3'-phosphate
  misc_feature 1..4: note = RNA
  misc_feature 5: note = DNA
  misc_feature 6..23: note = RNA
tgttgtatggtatacttcaaata

SEQ ID NO: 989 - DNA, 23 bp, synthetic construct
  source 1..23: mol_type = other DNA
  modified_base 1: mod_base = OTHER; note = Vinyl-phosphonate-2'-O-methyluridine-3'-phosphate
  modified_base 2: mod_base = OTHER; note = 2'-fluoroadenosine-3'-phosphate
  modified_base 3: mod_base = OTHER; note = 2'-O-methylguanosine-3'-phosphate
  modified_base 4: mod_base = OTHER; note = 2'-O-methyluridine-3'-phosphate
  modified_base 6: mod_base = OTHER; note = 2'-O-methylguanosine-3'-phosphate
  modified_base 7: mod_base = OTHER; note = Thymidine-glycol nucleic acid (GNA) S-Isomer
  modified_base 8: mod_base = OTHER; note = 2'-O-methyladenosine-3'-phosphate
  modified_base 9: mod_base = OTHER; note = 2'-O-methyluridine-3'-phosphate
  modified_base 10: mod_base = OTHER; note = 2'-O-methylguanosine-3'-phosphate
  modified_base 11: mod_base = OTHER; note = 2'-O-methylguanosine-3'-phosphate
  modified_base 12: mod_base = OTHER; note = 2'-O-methyluridine-3'-phosphate
  modified_base 13: mod_base = OTHER; note = 2'-O-methyladenosine-3'-phosphate
  modified_base 14: mod_base = OTHER; note = 2'-fluorouridine-3'-phosphate
  modified_base 15: mod_base = OTHER; note = 2'-O-methyladenosine-3'-phosphate
  modified_base 16: mod_base = OTHER; note = 2'-fluorocytidine-3'-phosphate
  modified_base 17: mod_base = OTHER; note = 2'-O-methyluridine-3'-phosphate
  modified_base 18: mod_base = OTHER; note = 2'-O-methyluridine-3'-phosphate
  modified_base 19: mod_base = OTHER; note = 2'-O-methylcytidine-3'-phosphate
  modified_base 20: mod_base = OTHER; note = 2'-O-methyladenosine-3'-phosphate
  modified_base 21: mod_base = OTHER; note = 2'-O-methyladenosine-3'-phosphorothioate
  modified_base 22: mod_base = OTHER; note = 2'-O-methyladenosine-3'-phosphorothioate
  modified_base 23: mod_base = OTHER; note = 2'-O-methyluridine-3'-phosphate
  misc_feature 1..4: note = RNA
  misc_feature 5: note = DNA
  misc_feature 6: note = RNA
  misc_feature 7: note = DNA
  misc_feature 8..23: note = RNA
tagttgtatggtatacttcaaat

SEQ ID NO: 990 - DNA, 23 bp, synthetic construct
  source 1..23: mol_type = other DNA
  modified_base 1: mod_base = OTHER; note = Vinyl-phosphonate-2'-O-methyluridine-3'-phosphate
  modified_base 2: mod_base = OTHER; note = 2'-fluoroguanosine-3'-phosphate
  modified_base 3: mod_base = OTHER; note = 2'-O-methylcytidine-3'-phosphate
  modified_base 4: mod_base = OTHER; note = 2'-O-methyluridine-3'-phosphate
  modified_base 6: mod_base = OTHER; note = 2'-O-methylguanosine-3'-phosphate
  modified_base 7: mod_base = OTHER; note = Adenosine-glycol nucleic acid (GNA)
  modified_base 8: mod_base = OTHER; note = 2'-O-methylguanosine-3'-phosphate
  modified_base 9: mod_base = OTHER; note = 2'-O-methyluridine-3'-phosphate
  modified_base 10: mod_base = OTHER; note = 2'-O-methyladenosine-3'-phosphate
  modified_base 11: mod_base = OTHER; note = 2'-O-methylguanosine-3'-phosphate
  modified_base 12: mod_base = OTHER; note = 2'-O-methylcytidine-3'-phosphate
  modified_base 13: mod_base = OTHER; note = 2'-O-methylcytidine-3'-phosphate
  modified_base 14: mod_base = OTHER; note = 2'-fluoroadenosine-3'-phosphate
  modified_base 15: mod_base = OTHER; note = 2'-O-methyluridine-3'-phosphate
  modified_base 16: mod_base = OTHER; note = 2'-fluorouridine-3'-phosphate
  modified_base 17: mod_base = OTHER; note = 2'-O-methylguanosine-3'-phosphate
  modified_base 18: mod_base = OTHER; note = 2'-O-methyluridine-3'-phosphate
  modified_base 19: mod_base = OTHER; note = 2'-O-methylcytidine-3'-phosphate
  modified_base 20: mod_base = OTHER; note = 2'-O-methylcytidine-3'-phosphate
  modified_base 21: mod_base = OTHER; note = 2'-O-methyladenosine-3'-phosphorothioate
  modified_base 22: mod_base = OTHER; note = 2'-O-methylcytidine-3'-phosphorothioate
  modified_base 23: mod_base = OTHER; note = 2'-O-methylguanosine-3'-phosphate
  misc_feature 1..4: note = RNA
  misc_feature 5: note = DNA
  misc_feature 6..23: note = RNA
tgcttgagtagccattgtccacg

SEQ ID NO: 991 - DNA, 23 bp, synthetic construct
  source 1..23: mol_type = other DNA
  modified_base 1: mod_base = OTHER; note = Vinyl-phosphonate-2'-O-methyluridine-3'-phosphate
  modified_base 3: mod_base = OTHER; note = 2'-O-methyladenosine-3'-phosphate
  modified_base 4: mod_base = OTHER; note = 2'-O-methylguanosine-3'-phosphate
  modified_base 6: mod_base = OTHER; note = 2'-O-methyluridine-3'-phosphate
  modified_base 8: mod_base = OTHER; note = 2'-O-methylguanosine-3'-phosphate
  modified_base 9: mod_base = OTHER; note = 2'-O-methyladenosine-3'-phosphate
  modified_base 10: mod_base = OTHER; note = 2'-O-methylguanosine-3'-phosphate
  modified_base 11: mod_base = OTHER; note = 2'-O-methyluridine-3'-phosphate
  modified_base 13: mod_base = OTHER; note = 2'-O-methylguanosine-3'-phosphate
  modified_base 14: mod_base = OTHER; note = 2'-fluorocytidine-3'-phosphate
  modified_base 15: mod_base = OTHER; note = 2'-O-methylcytidine-3'-phosphate
  modified_base 16: mod_base = OTHER; note = 2'-O-methyladenosine-3'-phosphate
  modified_base 17: mod_base = OTHER; note = 2'-O-methyluridine-3'-phosphate
  modified_base 18: mod_base = OTHER; note = 2'-O-methyluridine-3'-phosphate
  modified_base 19: mod_base = OTHER; note = 2'-O-methylguanosine-3'-phosphate
  modified_base 20: mod_base = OTHER; note = 2'-O-methyluridine-3'-phosphate
  modified_base 21: mod_base = OTHER; note = 2'-O-methylcytidine-3'-phosphorothioate
  modified_base 22: mod_base = OTHER; note = 2'-O-methylcytidine-3'-phosphorothioate
  modified_base 23: mod_base = OTHER; note = 2'-O-methyladenosine-3'-phosphate
  misc_feature 1: note = RNA
  misc_feature 2: note = DNA
  misc_feature 3..4: note = RNA
  misc_feature 5: note = DNA
  misc_feature 6: note = RNA
  misc_feature 7: note = DNA
  misc_feature 8..11: note = RNA
  misc_feature 12: note = DNA
  misc_feature 13..23: note = RNA
tcagcttgagtagccattgtcca

SEQ ID NO: 992 - DNA, 23 bp, synthetic construct
  source 1..23: mol_type = other DNA
  modified_base 1: mod_base = OTHER; note = Vinyl-phosphonate-2'-O-methyluridine-3'-phosphate
  modified_base 2: mod_base = OTHER; note = 2'-fluorouridine-3'-phosphate
  modified_base 3: mod_base = OTHER; note = 2'-O-methylcytidine-3'-phosphate
  modified_base 4: mod_base = OTHER; note = 2'-O-methyladenosine-3'-phosphate
  modified_base 6: mod_base = OTHER; note = 2'-O-methylcytidine-3'-phosphate
  modified_base 7: mod_base = OTHER; note = Thymidine-glycol nucleic acid (GNA) S-Isomer
  modified_base 8: mod_base = OTHER; note = 2'-O-methyluridine-3'-phosphate
  modified_base 9: mod_base = OTHER; note = 2'-O-methylguanosine-3'-phosphate
  modified_base 10: mod_base = OTHER; note = 2'-O-methyladenosine-3'-phosphate
  modified_base 11: mod_base = OTHER; note = 2'-O-methylguanosine-3'-phosphate
  modified_base 12: mod_base = OTHER; note = 2'-O-methyluridine-3'-phosphate
  modified_base 13: mod_base = OTHER; note = 2'-O-methyladenosine-3'-phosphate
  modified_base 14: mod_base = OTHER; note = 2'-fluoroguanosine-3'-phosphate
  modified_base 15: mod_base = OTHER; note = 2'-O-methylcytidine-3'-phosphate
  modified_base 16: mod_base = OTHER; note = 2'-fluorocytidine-3'-phosphate
  modified_base 17: mod_base = OTHER; note = 2'-O-methyladenosine-3'-phosphate
  modified_base 18: mod_base = OTHER; note = 2'-O-methyluridine-3'-phosphate
  modified_base 19: mod_base = OTHER; note = 2'-O-methyluridine-3'-phosphate
  modified_base 20: mod_base = OTHER; note = 2'-O-methylguanosine-3'-phosphate
  modified_base 21: mod_base = OTHER; note = 2'-O-methyluridine-3'-phosphorothioate
  modified_base 22: mod_base = OTHER; note = 2'-O-methylcytidine-3'-phosphorothioate
  modified_base 23: mod_base = OTHER; note = 2'-O-methylcytidine-3'-phosphate
  misc_feature 1..4: note = RNA
  misc_feature 5: note = DNA
  misc_feature 6: note = RNA
  misc_feature 7: note = DNA
  misc_feature 8..23: note = RNA
ttcagcttgagtagccattgtcc

SEQ ID NO: 993 - DNA, 23 bp, synthetic construct
  source 1..23: mol_type = other DNA
  modified_base 1: mod_base = OTHER; note = Vinyl-phosphonate-2'-O-methyluridine-3'-phosphate
  modified_base 3: mod_base = OTHER; note = 2'-O-methyladenosine-3'-phosphate
  modified_base 4: mod_base = OTHER; note = 2'-O-methyladenosine-3'-phosphate
  modified_base 6: mod_base = OTHER; note = 2'-O-methyluridine-3'-phosphate
  modified_base 8: mod_base = OTHER; note = 2'-O-methylcytidine-3'-phosphate
  modified_base 9: mod_base = OTHER; note = 2'-O-methyladenosine-3'-phosphate
  modified_base 10: mod_base = OTHER; note = 2'-O-methyluridine-3'-phosphate
  modified_base 11: mod_base = OTHER; note = 2'-O-methylcytidine-3'-phosphate
  modified_base 13: mod_base = OTHER; note = 2'-O-methyladenosine-3'-phosphate
  modified_base 14: mod_base = OTHER; note = 2'-fluoroadenosine-3'-phosphate
  modified_base 15: mod_base = OTHER; note = 2'-O-methyluridine-3'-phosphate
  modified_base 16: mod_base = OTHER; note = 2'-O-methylcytidine-3'-phosphate
  modified_base 17: mod_base = OTHER; note = 2'-O-methyladenosine-3'-phosphate
  modified_base 18: mod_base = OTHER; note = 2'-O-methylguanosine-3'-phosphate
  modified_base 19: mod_base = OTHER; note = 2'-O-methylcytidine-3'-phosphate
  modified_base 20: mod_base = OTHER; note = 2'-O-methyluridine-3'-phosphate
  modified_base 21: mod_base = OTHER; note = 2'-O-methyluridine-3'-phosphorothioate
  modified_base 22: mod_base = OTHER; note = 2'-O-methylguanosine-3'-phosphorothioate
  modified_base 23: mod_base = OTHER; note = 2'-O-methyladenosine-3'-phosphate
  misc_feature 1: note = RNA
  misc_feature 2: note = DNA
  misc_feature 3..4: note = RNA
  misc_feature 5: note = DNA
  misc_feature 6: note = RNA
  misc_feature 7: note = DNA
  misc_feature 8..11: note = RNA
  misc_feature 12: note = DNA
  misc_feature 13..23: note = RNA
tcaactccatcaaatcagcttga

SEQ ID NO: 994 - DNA, 23 bp, synthetic construct
  source 1..23: mol_type = other DNA
  modified_base 1: mod_base = OTHER; note = Vinyl-phosphonate-2'-O-methyluridine-3'-phosphate
  modified_base 3: mod_base = OTHER; note = 2'-O-methylcytidine-3'-phosphate
  modified_base 4: mod_base = OTHER; note = 2'-O-methyladenosine-3'-phosphate
  modified_base 6: mod_base = OTHER; note = 2'-O-methylcytidine-3'-phosphate
  modified_base 8: mod_base = OTHER; note = 2'-O-methylcytidine-3'-phosphate
  modified_base 9: mod_base = OTHER; note = 2'-O-methylcytidine-3'-phosphate
  modified_base 10: mod_base = OTHER; note = 2'-O-methyladenosine-3'-phosphate
  modified_base 11: mod_base = OTHER; note = 2'-O-methyluridine-3'-phosphate
  modified_base 13: mod_base = OTHER; note = 2'-O-methyladenosine-3'-phosphate
  modified_base 14: mod_base = OTHER; note = 2'-fluoroadenosine-3'-phosphate
  modified_base 15: mod_base = OTHER; note = 2'-O-methyladenosine-3'-phosphate
  modified_base 16: mod_base = OTHER; note = 2'-O-methyluridine-3'-phosphate
  modified_base 17: mod_base = OTHER; note = 2'-O-methylcytidine-3'-phosphate
  modified_base 18: mod_base = OTHER; note = 2'-O-methyladenosine-3'-phosphate
  modified_base 19: mod_base = OTHER; note = 2'-O-methylguanosine-3'-phosphate
  modified_base 20: mod_base = OTHER; note = 2'-O-methylcytidine-3'-phosphate
  modified_base 21: mod_base = OTHER; note = 2'-O-methyluridine-3'-phosphorothioate
  modified_base 22: mod_base = OTHER; note = 2'-O-methyluridine-3'-phosphorothioate
  modified_base 23: mod_base = OTHER; note = 2'-O-methylguanosine-3'-phosphate
  misc_feature 1: note = RNA
  misc_feature 2: note = DNA
  misc_feature 3..4: note = RNA
  misc_feature 5: note = DNA
  misc_feature 6: note = RNA
  misc_feature 7: note = DNA
  misc_feature 8..11: note = RNA
  misc_feature 12: note = DNA
  misc_feature 13..23: note = RNA
tccaactccatcaaatcagcttg

SEQ ID NO: 995 - DNA, 23 bp, synthetic construct
  source 1..23: mol_type = other DNA
  modified_base 1: mod_base = OTHER; note = Vinyl-phosphonate-2'-O-methyluridine-3'-phosphate
  modified_base 3: mod_base = OTHER; note = 2'-O-methylcytidine-3'-phosphate
  modified_base 4: mod_base = OTHER; note = 2'-O-methyluridine-3'-phosphate
  modified_base 6: mod_base = OTHER; note = 2'-O-methyluridine-3'-phosphate
  modified_base 8: mod_base = OTHER; note = 2'-O-methylcytidine-3'-phosphate
  modified_base 9: mod_base = OTHER; note = 2'-O-methylcytidine-3'-phosphate
  modified_base 10: mod_base = OTHER; note = 2'-O-methyladenosine-3'-phosphate
  modified_base 11: mod_base = OTHER; note = 2'-O-methylcytidine-3'-phosphate
  modified_base 13: mod_base = OTHER; note = 2'-O-methylcytidine-3'-phosphate
  modified_base 14: mod_base = OTHER; note = 2'-fluoroadenosine-3'-phosphate
  modified_base 15: mod_base = OTHER; note = 2'-O-methylguanosine-3'-phosphate
  modified_base 16: mod_base = OTHER; note = 2'-O-methyladenosine-3'-phosphate
  modified_base 17: mod_base = OTHER; note = 2'-O-methylguanosine-3'-phosphate
  modified_base 18: mod_base = OTHER; note = 2'-O-methyladenosine-3'-phosphate
  modified_base 19: mod_base = OTHER; note = 2'-O-methyladenosine-3'-phosphate
  modified_base 20: mod_base = OTHER; note = 2'-O-methylguanosine-3'-phosphate
  modified_base 21: mod_base = OTHER; note = 2'-O-methylguanosine-3'-phosphorothioate
  modified_base 22: mod_base = OTHER; note = 2'-O-methyladenosine-3'-phosphorothioate
  modified_base 23: mod_base = OTHER; note = 2'-O-methylguanosine-3'-phosphate
  misc_feature 1: note = RNA
  misc_feature 2: note = DNA
  misc_feature 3..4: note = RNA
  misc_feature 5: note = DNA
  misc_feature 6: note = RNA
  misc_feature 7: note = DNA
  misc_feature 8..11: note = RNA
  misc_feature 12: note = DNA
  misc_feature 13..23: note = RNA
tcctttaccactcagagaaggag

SEQ ID NO: 996 - DNA, 23 bp, synthetic construct
  source 1..23: mol_type = other DNA
  modified_base 1: mod_base = OTHER; note = Vinyl-phosphonate-2'-O-methyluridine-3'-phosphate
  modified_base 2: mod_base = OTHER; note = 2'-fluorouridine-3'-phosphate
  modified_base 3: mod_base = OTHER; note = 2'-O-methylguanosine-3'-phosphate
  modified_base 4: mod_base = OTHER; note = 2'-O-methyluridine-3'-phosphate
  modified_base 6: mod_base = OTHER; note = 2'-O-methylcytidine-3'-phosphate
  modified_base 7: mod_base = OTHER; note = Thymidine-glycol nucleic acid (GNA) S-Isomer
  modified_base 8: mod_base = OTHER; note = 2'-O-methyluridine-3'-phosphate
  modified_base 9: mod_base = OTHER; note = 2'-O-methylguanosine-3'-phosphate
  modified_base 10: mod_base = OTHER; note = 2'-O-methyladenosine-3'-phosphate
  modified_base 11: mod_base = OTHER; note = 2'-O-methylguanosine-3'-phosphate
  modified_base 12: mod_base = OTHER; note = 2'-O-methyluridine-3'-phosphate
  modified_base 13: mod_base = OTHER; note = 2'-O-methylguanosine-3'-phosphate
  modified_base 14: mod_base = OTHER; note = 2'-fluoroadenosine-3'-phosphate
  modified_base 15: mod_base = OTHER; note = 2'-O-methyladenosine-3'-phosphate
  modified_base 16: mod_base = OTHER; note = 2'-fluoroguanosine-3'-phosphate
  modified_base 17: mod_base = OTHER; note = 2'-O-methylguanosine-3'-phosphate
  modified_base 18: mod_base = OTHER; note = 2'-O-methyladenosine-3'-phosphate
  modified_base 19: mod_base = OTHER; note = 2'-O-methylcytidine-3'-phosphate
  modified_base 20: mod_base = OTHER; note = 2'-O-methyluridine-3'-phosphate
  modified_base 21: mod_base = OTHER; note = 2'-O-methylguanosine-3'-phosphorothioate
  modified_base 22: mod_base = OTHER; note = 2'-O-methyladenosine-3'-phosphorothioate
  modified_base 23: mod_base = OTHER; note = 2'-O-methylguanosine-3'-phosphate
  misc_feature 1..4: note = RNA
  misc_feature 5: note = DNA
  misc_feature 6: note = RNA
  misc_feature 7: note = DNA
  misc_feature 8..23: note = RNA
ttgttcttgagtgaaggactgag

SEQ ID NO: 997 - DNA, 23 bp, synthetic construct
  source 1..23: mol_type = other DNA
  modified_base 1: mod_base = OTHER; note = Vinyl-phosphonate-2'-O-methyluridine-3'-phosphate
  modified_base 3: mod_base = OTHER; note = 2'-O-methyluridine-3'-phosphate
  modified_base 4: mod_base = OTHER; note = 2'-O-methyladenosine-3'-phosphate
  modified_base 6: mod_base = OTHER; note = 2'-O-methyluridine-3'-phosphate
  modified_base 8: mod_base = OTHER; note = 2'-O-methylguanosine-3'-phosphate
  modified_base 9: mod_base = OTHER; note = 2'-O-methyluridine-3'-phosphate
  modified_base 10: mod_base = OTHER; note = 2'-O-methyluridine-3'-phosphate
  modified_base 11: mod_base = OTHER; note = 2'-O-methylcytidine-3'-phosphate
  modified_base 13: mod_base = OTHER; note = 2'-O-methyluridine-3'-phosphate
  modified_base 14: mod_base = OTHER; note = 2'-fluoroguanosine-3'-phosphate
  modified_base 15: mod_base = OTHER; note = 2'-O-methyladenosine-3'-phosphate
  modified_base 16: mod_base = OTHER; note = 2'-O-methylguanosine-3'-phosphate
  modified_base 17: mod_base = OTHER; note = 2'-O-methyluridine-3'-phosphate
  modified_base 18: mod_base = OTHER; note = 2'-O-methylguanosine-3'-phosphate
  modified_base 19: mod_base = OTHER; note = 2'-O-methyladenosine-3'-phosphate
  modified_base 20: mod_base = OTHER; note = 2'-O-methyladenosine-3'-phosphate
  modified_base 21: mod_base = OTHER; note = 2'-O-methylguanosine-3'-phosphorothioate
  modified_base 22: mod_base = OTHER; note = 2'-O-methylguanosine-3'-phosphorothioate
  modified_base 23: mod_base = OTHER; note = 2'-O-methyladenosine-3'-phosphate
  misc_feature 1: note = RNA
  misc_feature 2: note = DNA
  misc_feature 3..4: note = RNA
  misc_feature 5: note = DNA
  misc_feature 6: note = RNA
  misc_feature 7: note = DNA
  misc_feature 8..11: note = RNA
  misc_feature 12: note = DNA
  misc_feature 13..23: note = RNA
tctacttgttcttgagtgaagga

SEQ ID NO: 998 - DNA, 23 bp, synthetic construct
  source 1..23: mol_type = other DNA
  modified_base 1: mod_base = OTHER; note = Vinyl-phosphonate-2'-O-methyluridine-3'-phosphate
  modified_base 3: mod_base = OTHER; note = 2'-O-methyladenosine-3'-phosphate
  modified_base 4: mod_base = OTHER; note = 2'-O-methylguanosine-3'-phosphate
  modified_base 6: mod_base = OTHER; note = 2'-O-methyluridine-3'-phosphate
  modified_base 8: mod_base = OTHER; note = 2'-O-methylcytidine-3'-phosphate
  modified_base 9: mod_base = OTHER; note = 2'-O-methyluridine-3'-phosphate
  modified_base 10: mod_base = OTHER; note = 2'-O-methyluridine-3'-phosphate
  modified_base 11: mod_base = OTHER; note = 2'-O-methylguanosine-3'-phosphate
  modified_base 13: mod_base = OTHER; note = 2'-O-methyluridine-3'-phosphate
  modified_base 14: mod_base = OTHER; note = 2'-fluorocytidine-3'-phosphate
  modified_base 15: mod_base = OTHER; note = 2'-O-methyluridine-3'-phosphate
  modified_base 16: mod_base = OTHER; note = 2'-O-methyluridine-3'-phosphate
  modified_base 17: mod_base = OTHER; note = 2'-O-methylguanosine-3'-phosphate
  modified_base 18: mod_base = OTHER; note = 2'-O-methyladenosine-3'-phosphate
  modified_base 19: mod_base = OTHER; note = 2'-O-methylguanosine-3'-phosphate
  modified_base 20: mod_base = OTHER; note = 2'-O-methyluridine-3'-phosphate
  modified_base 21: mod_base = OTHER; note = 2'-O-methylguanosine-3'-phosphorothioate
  modified_base 22: mod_base = OTHER; note = 2'-O-methyladenosine-3'-phosphorothioate
  modified_base 23: mod_base = OTHER; note = 2'-O-methyladenosine-3'-phosphate
  misc_feature 1: note = RNA
  misc_feature 2: note = DNA
  misc_feature 3..4: note = RNA
  misc_feature 5: note = DNA
  misc_feature 6: note = RNA
  misc_feature 7: note = DNA
  misc_feature 8..11: note = RNA
  misc_feature 12: note = DNA
  misc_feature 13..23: note = RNA
tcagctacttgttcttgagtgaa

SEQ ID NO: 999 - DNA, 23 bp, synthetic construct
  source 1..23: mol_type = other DNA
  modified_base 1: mod_base = OTHER; note = Vinyl-phosphonate-2'-O-methyluridine-3'-phosphate
  modified_base 2: mod_base = OTHER; note = 2'-fluorouridine-3'-phosphate
  modified_base 3: mod_base = OTHER; note = 2'-O-methylguanosine-3'-phosphate
  modified_base 4: mod_base = OTHER; note = 2'-O-methyluridine-3'-phosphate
  modified_base 6: mod_base = OTHER; note = 2'-O-methylcytidine-3'-phosphate
  modified_base 7: mod_base = OTHER; note = Adenosine-glycol nucleic acid (GNA)
  modified_base 8: mod_base = OTHER; note = 2'-O-methyluridine-3'-phosphate
  modified_base 9: mod_base = OTHER; note = 2'-O-methylcytidine-3'-phosphate
  modified_base 10: mod_base = OTHER; note = 2'-O-methyladenosine-3'-phosphate
  modified_base 11: mod_base = OTHER; note = 2'-O-methyladenosine-3'-phosphate
  modified_base 12: mod_base = OTHER; note = 2'-O-methyluridine-3'-phosphate
  modified_base 13: mod_base = OTHER; note = 2'-O-methyladenosine-3'-phosphate
  modified_base 14: mod_base = OTHER; note = 2'-fluorouridine-3'-phosphate
  modified_base 15: mod_base = OTHER; note = 2'-O-methylcytidine-3'-phosphate
  modified_base 16: mod_base = OTHER; note = 2'-fluoroadenosine-3'-phosphate
  modified_base 17: mod_base = OTHER; note = 2'-O-methylguanosine-3'-phosphate
  modified_base 18: mod_base = OTHER; note = 2'-O-methylcytidine-3'-phosphate
  modified_base 19: mod_base = OTHER; note = 2'-O-methyluridine-3'-phosphate
  modified_base 20: mod_base = OTHER; note = 2'-O-methyladenosine-3'-phosphate
  modified_base 21: mod_base = OTHER; note = 2'-O-methylcytidine-3'-phosphorothioate
  modified_base 22: mod_base = OTHER; note = 2'-O-methyluridine-3'-phosphorothioate
  modified_base 23: mod_base = OTHER; note = 2'-O-methyluridine-3'-phosphate
  misc_feature 1..4: note = RNA
  misc_feature 5: note = DNA
  misc_feature 6..23: note = RNA
ttgtccatcaatatcagctactt

SEQ ID NO: 1000 - DNA, 23 bp, synthetic construct
  source 1..23: mol_type = other DNA
  modified_base 1: mod_base = OTHER; note = Vinyl-phosphonate-2'-O-methyluridine-3'-phosphate
  modified_base 2: mod_base = OTHER; note = 2'-fluoroadenosine-3'-phosphate
  modified_base 3: mod_base = OTHER; note = 2'-O-methyluridine-3'-phosphate
  modified_base 4: mod_base = OTHER; note = 2'-O-methyluridine-3'-phosphate
  modified_base 6: mod_base = OTHER; note = 2'-O-methylcytidine-3'-phosphate
  modified_base 7: mod_base = OTHER; note = Adenosine-glycol nucleic acid (GNA)
  modified_base 8: mod_base = OTHER; note = 2'-O-methyluridine-3'-phosphate
  modified_base 9: mod_base = OTHER; note = 2'-O-methyladenosine-3'-phosphate
  modified_base 10: mod_base = OTHER; note = 2'-O-methylcytidine-3'-phosphate
  modified_base 11: mod_base = OTHER; note = 2'-O-methyluridine-3'-phosphate
  modified_base 12: mod_base = OTHER; note = 2'-O-methylguanosine-3'-phosphate
  modified_base 13: mod_base = OTHER; note = 2'-O-methyluridine-3'-phosphate
  modified_base 14: mod_base = OTHER; note = 2'-fluorocytidine-3'-phosphate
  modified_base 15: mod_base = OTHER; note = 2'-O-methylcytidine-3'-phosphate
  modified_base 16: mod_base = OTHER; note = 2'-fluoroadenosine-3'-phosphate
  modified_base 17: mod_base = OTHER; note = 2'-O-methyluridine-3'-phosphate
  modified_base 18: mod_base = OTHER; note = 2'-O-methylcytidine-3'-phosphate
  modified_base 19: mod_base = OTHER; note = 2'-O-methyladenosine-3'-phosphate
  modified_base 20: mod_base = OTHER; note = 2'-O-methyladenosine-3'-phosphate
  modified_base 21: mod_base = OTHER; note = 2'-O-methyluridine-3'-phosphorothioate
  modified_base 22: mod_base = OTHER; note = 2'-O-methyladenosine-3'-phosphorothioate
  modified_base 23: mod_base = OTHER; note = 2'-O-methyluridine-3'-phosphate
  misc_feature 1..4: note = RNA
  misc_feature 5: note = DNA
  misc_feature 6..23: note = RNA
tattgcatactgtccatcaatat

SEQ ID NO: 1001 - DNA, 23 bp, synthetic construct
  source 1..23: mol_type = other DNA
  modified_base 1: mod_base = OTHER; note = Vinyl-phosphonate-2'-O-methyluridine-3'-phosphate
  modified_base 3: mod_base = OTHER; note = 2'-O-methylguanosine-3'-phosphate
  modified_base 4: mod_base = OTHER; note = 2'-O-methylcytidine-3'-phosphate
  modified_base 6: mod_base = OTHER; note = 2'-O-methylcytidine-3'-phosphate
  modified_base 8: mod_base = OTHER; note = 2'-O-methyladenosine-3'-phosphate
  modified_base 9: mod_base = OTHER; note = 2'-O-methylguanosine-3'-phosphate
  modified_base 10: mod_base = OTHER; note = 2'-O-methyluridine-3'-phosphate
  modified_base 11: mod_base = OTHER; note = 2'-O-methylcytidine-3'-phosphate
  modified_base 13: mod_base = OTHER; note = 2'-O-methyluridine-3'-phosphate
  modified_base 14: mod_base = OTHER; note = 2'-fluorouridine-3'-phosphate
  modified_base 15: mod_base = OTHER; note = 2'-O-methylguanosine-3'-phosphate
  modified_base 16: mod_base = OTHER; note = 2'-O-methylcytidine-3'-phosphate
  modified_base 17: mod_base = OTHER; note = 2'-O-methyladenosine-3'-phosphate
  modified_base 18: mod_base = OTHER; note = 2'-O-methyluridine-3'-phosphate
  modified_base 19: mod_base = OTHER; note = 2'-O-methyladenosine-3'-phosphate
  modified_base 20: mod_base = OTHER; note = 2'-O-methylcytidine-3'-phosphate
  modified_base 21: mod_base = OTHER; note = 2'-O-methyluridine-3'-phosphorothioate
  modified_base 22: mod_base = OTHER; note = 2'-O-methylguanosine-3'-phosphorothioate
  modified_base 23: mod_base = OTHER; note = 2'-O-methyluridine-3'-phosphate
  misc_feature 1: note = RNA
  misc_feature 2: note = DNA
  misc_feature 3..4: note = RNA
  misc_feature 5: note = DNA
  misc_feature 6: note = RNA
  misc_feature 7: note = DNA
  misc_feature 8..11: note = RNA
  misc_feature 12: note = DNA
  misc_feature 13..23: note = RNA
tagctcgagtcattgcatactgt

SEQ ID NO: 1002 - DNA, 23 bp, synthetic construct
  source 1..23: mol_type = other DNA
  modified_base 1: mod_base = OTHER; note = Vinyl-phosphonate-2'-O-methyluridine-3'-phosphate
  modified_base 2: mod_base = OTHER; note = 2'-fluoroguanosine-3'-phosphate
  modified_base 3: mod_base = OTHER; note = 2'-O-methylguanosine-3'-phosphate
  modified_base 4: mod_base = OTHER; note = 2'-O-methyladenosine-3'-phosphate
  modified_base 6: mod_base = OTHER; note = 2'-O-methylcytidine-3'-phosphate
  modified_base 7: mod_base = OTHER; note = Adenosine-glycol nucleic acid (GNA)
  modified_base 8: mod_base = OTHER; note = 2'-O-methyluridine-3'-phosphate
  modified_base 9: mod_base = OTHER; note = 2'-O-methyladenosine-3'-phosphate
  modified_base 10: mod_base = OTHER; note = 2'-O-methylguanosine-3'-phosphate
  modified_base 11: mod_base = OTHER; note = 2'-O-methylcytidine-3'-phosphate
  modified_base 12: mod_base = OTHER; note = 2'-O-methyladenosine-3'-phosphate
  modified_base 13: mod_base = OTHER; note = 2'-O-methylguanosine-3'-phosphate
  modified_base 14: mod_base = OTHER; note = 2'-fluorocytidine-3'-phosphate
  modified_base 15: mod_base = OTHER; note = 2'-O-methyluridine-3'-phosphate
  modified_base 16: mod_base = OTHER; note = 2'-fluorocytidine-3'-phosphate
  modified_base 17: mod_base = OTHER; note = 2'-O-methylguanosine-3'-phosphate
  modified_base 18: mod_base = OTHER; note = 2'-O-methyluridine-3'-phosphate
  modified_base 19: mod_base = OTHER; note = 2'-O-methyladenosine-3'-phosphate
  modified_base 20: mod_base = OTHER; note = 2'-O-methylcytidine-3'-phosphate
  modified_base 21: mod_base = OTHER; note = 2'-O-methylcytidine-3'-phosphorothioate
  modified_base 22: mod_base = OTHER; note = 2'-O-methylcytidine-3'-phosphorothioate
  modified_base 23: mod_base = OTHER; note = 2'-O-methyluridine-3'-phosphate
  misc_feature 1..4: note = RNA
  misc_feature 5: note = DNA
  misc_feature 6..23: note = RNA
tggaacatagcagctcgtaccct

SEQ ID NO: 1003 - DNA, 23 bp, synthetic construct
  source 1..23: mol_type = other DNA
  modified_base 1: mod_base = OTHER; note = Vinyl-phosphonate-2'-O-methyluridine-3'-phosphate
  modified_base 3: mod_base = OTHER; note = 2'-O-methyladenosine-3'-phosphate
  modified_base 4: mod_base = OTHER; note = 2'-O-methylguanosine-3'-phosphate
  modified_base 6: mod_base = OTHER; note = 2'-O-methylguanosine-3'-phosphate
  modified_base 8: mod_base = OTHER; note = 2'-O-methyladenosine-3'-phosphate
  modified_base 9: mod_base = OTHER; note = 2'-O-methylcytidine-3'-phosphate
  modified_base 10: mod_base = OTHER; note = 2'-O-methyladenosine-3'-phosphate
  modified_base 11: mod_base = OTHER; note = 2'-O-methyluridine-3'-phosphate
  modified_base 13: mod_base = OTHER; note = 2'-O-methylguanosine-3'-phosphate
  modified_base 14: mod_base = OTHER; note = 2'-fluorocytidine-3'-phosphate
  modified_base 15: mod_base = OTHER; note = 2'-O-methyladenosine-3'-phosphate
  modified_base 16: mod_base = OTHER; note = 2'-O-methylguanosine-3'-phosphate
  modified_base 17: mod_base = OTHER; note = 2'-O-methylcytidine-3'-phosphate
  modified_base 18: mod_base = OTHER; note = 2'-O-methyluridine-3'-phosphate
  modified_base 19: mod_base = OTHER; note = 2'-O-methylcytidine-3'-phosphate
  modified_base 20: mod_base = OTHER; note = 2'-O-methylguanosine-3'-phosphate
  modified_base 21: mod_base = OTHER; note = 2'-O-methyluridine-3'-phosphorothioate
  modified_base 22: mod_base = OTHER; note = 2'-O-methyladenosine-3'-phosphorothioate
  modified_base 23: mod_base = OTHER; note = 2'-O-methylcytidine-3'-phosphate
  misc_feature 1: note = RNA
  misc_feature 2: note = DNA
  misc_feature 3..4: note = RNA
  misc_feature 5: note = DNA
  misc_feature 6: note = RNA
  misc_feature 7: note = DNA
  misc_feature 8..11: note = RNA
  misc_feature 12: note = DNA
  misc_feature 13..23: note = RNA
tcagggaacatagcagctcgtac

SEQ ID NO: 1004 - DNA, 23 bp, synthetic construct
  source 1..23: mol_type = other DNA
  modified_base 1: mod_base = OTHER; note = Vinyl-phosphonate-2'-O-methyluridine-3'-phosphate
  modified_base 3: mod_base = OTHER; note = 2'-O-methyluridine-3'-phosphate
  modified_base 4: mod_base = OTHER; note = 2'-O-methylcytidine-3'-phosphate
  modified_base 6: mod_base = OTHER; note = 2'-O-methyladenosine-3'-phosphate
  modified_base 8: mod_base = OTHER; note = 2'-O-methyluridine-3'-phosphate
  modified_base 9: mod_base = OTHER; note = 2'-O-methylguanosine-3'-phosphate
  modified_base 10: mod_base = OTHER; note = 2'-O-methyluridine-3'-phosphate
  modified_base 11: mod_base = OTHER; note = 2'-O-methylcytidine-3'-phosphate
  modified_base 13: mod_base = OTHER; note = 2'-O-methylcytidine-3'-phosphate
  modified_base 14: mod_base = OTHER; note = 2'-fluoroadenosine-3'-phosphate
  modified_base 15: mod_base = OTHER; note = 2'-O-methylguanosine-3'-phosphate
  modified_base 16: mod_base = OTHER; note = 2'-O-methylguanosine-3'-phosphate
  modified_base 17: mod_base = OTHER; note = 2'-O-methylguanosine-3'-phosphate
  modified_base 18: mod_base = OTHER; note = 2'-O-methyladenosine-3'-phosphate
  modified_base 19: mod_base = OTHER; note = 2'-O-methyladenosine-3'-phosphate
  modified_base 20: mod_base = OTHER; note = 2'-O-methylcytidine-3'-phosphate
  modified_base 21: mod_base = OTHER; note = 2'-O-methyladenosine-3'-phosphorothioate
  modified_base 22: mod_base = OTHER; note = 2'-O-methyluridine-3'-phosphorothioate
  modified_base 23: mod_base = OTHER; note = 2'-O-methyladenosine-3'-phosphate
  misc_feature 1: note = RNA
  misc_feature 2: note = DNA
  misc_feature 3..4: note = RNA
  misc_feature 5: note = DNA
  misc_feature 6: note = RNA
  misc_feature 7: note = DNA
  misc_feature 8..11: note = RNA
  misc_feature 12: note = DNA
  misc_feature 13..23: note = RNA
tatctaatgtctcagggaacata

SEQ ID NO: 1005 - DNA, 23 bp, synthetic construct
  source 1..23: mol_type = other DNA
  modified_base 1: mod_base = OTHER; note = Vinyl-phosphonate-2'-O-methyluridine-3'-phosphate
  modified_base 2: mod_base = OTHER; note = 2'-fluorouridine-3'-phosphate
  modified_base 3: mod_base = OTHER; note = 2'-O-methylcytidine-3'-phosphate
  modified_base 4: mod_base = OTHER; note = 2'-O-methyladenosine-3'-phosphate
  modified_base 6: mod_base = OTHER; note = 2'-O-methylcytidine-3'-phosphate
  modified_base 7: mod_base = OTHER; note = Thymidine-glycol nucleic acid (GNA) S-Isomer
  modified_base 8: mod_base = OTHER; note = 2'-O-methyladenosine-3'-phosphate
  modified_base 9: mod_base = OTHER; note = 2'-O-methyladenosine-3'-phosphate
  modified_base 10: mod_base = OTHER; note = 2'-O-methyluridine-3'-phosphate
  modified_base 11: mod_base = OTHER; note = 2'-O-methylguanosine-3'-phosphate
  modified_base 12: mod_base = OTHER; note = 2'-O-methyluridine-3'-phosphate
  modified_base 13: mod_base = OTHER; note = 2'-O-methylcytidine-3'-phosphate
  modified_base 14: mod_base = OTHER; note = 2'-fluorouridine-3'-phosphate
  modified_base 15: mod_base = OTHER; note = 2'-O-methylcytidine-3'-phosphate
  modified_base 16: mod_base = OTHER; note = 2'-fluoroadenosine-3'-phosphate
  modified_base 17: mod_base = OTHER; note = 2'-O-methylguanosine-3'-phosphate
  modified_base 18: mod_base = OTHER; note = 2'-O-methylguanosine-3'-phosphate
  modified_base 19: mod_base = OTHER; note = 2'-O-methylguanosine-3'-phosphate
  modified_base 20: mod_base = OTHER; note = 2'-O-methyladenosine-3'-phosphate
  modified_base 21: mod_base = OTHER; note = 2'-O-methyladenosine-3'-phosphorothioate
  modified_base 22: mod_base = OTHER; note = 2'-O-methylcytidine-3'-phosphorothioate
  modified_base 23: mod_base = OTHER; note = 2'-O-methyladenosine-3'-phosphate
  misc_feature 1..4: note = RNA
  misc_feature 5: note = DNA
  misc_feature 6: note = RNA
  misc_feature 7: note = DNA
  misc_feature 8..23: note = RNA
ttcatctaatgtctcagggaaca

SEQ ID NO: 1006 - DNA, 23 bp, synthetic construct
  source 1..23: mol_type = other DNA
  modified_base 1: mod_base = OTHER; note = Vinyl-phosphonate-2'-O-methyluridine-3'-phosphate
  modified_base 2: mod_base = OTHER; note = 2'-fluoroguanosine-3'-phosphate
  modified_base 3: mod_base = OTHER; note = 2'-O-methylguanosine-3'-phosphate
  modified_base 4: mod_base = OTHER; note = 2'-O-methyladenosine-3'-phosphate
  modified_base 6: mod_base = OTHER; note = 2'-O-methylcytidine-3'-phosphate
  modified_base 7: mod_base = OTHER; note = Thymidine-glycol nucleic acid (GNA) S-Isomer
  modified_base 8: mod_base = OTHER; note = 2'-O-methylguanosine-3'-phosphate
  modified_base 9: mod_base = OTHER; note = 2'-O-methylcytidine-3'-phosphate
  modified_base 10: mod_base = OTHER; note = 2'-O-methyladenosine-3'-phosphate
  modified_base 11: mod_base = OTHER; note = 2'-O-methyluridine-3'-phosphate
  modified_base 12: mod_base = OTHER; note = 2'-O-methylguanosine-3'-phosphate
  modified_base 13: mod_base = OTHER; note = 2'-O-methylcytidine-3'-phosphate
  modified_base 14: mod_base = OTHER; note = 2'-fluorocytidine-3'-phosphate
  modified_base 15: mod_base = OTHER; note = 2'-O-methylcytidine-3'-phosphate
  modified_base 16: mod_base = OTHER; note = 2'-fluorouridine-3'-phosphate
  modified_base 17: mod_base = OTHER; note = 2'-O-methylcytidine-3'-phosphate
  modified_base 18: mod_base = OTHER; note = 2'-O-methyladenosine-3'-phosphate
  modified_base 19: mod_base = OTHER; note = 2'-O-methyluridine-3'-phosphate
  modified_base 20: mod_base = OTHER; note = 2'-O-methylcytidine-3'-phosphate
  modified_base 21: mod_base = OTHER; note = 2'-O-methyluridine-3'-phosphorothioate
  modified_base 22: mod_base = OTHER; note = 2'-O-methyladenosine-3'-phosphorothioate
  modified_base 23: mod_base = OTHER; note = 2'-O-methyladenosine-3'-phosphate
  misc_feature 1..4: note = RNA
  misc_feature 5: note = DNA
  misc_feature 6: note = RNA
  misc_feature 7: note = DNA
  misc_feature 8..23: note = RNA
tggatctgcatgccctcatctaa

SEQ ID NO: 1007 - DNA, 23 bp, synthetic construct
  source 1..23: mol_type = other DNA
  modified_base 1: mod_base = OTHER; note = Vinyl-phosphonate-2'-O-methyluridine-3'-phosphate
  modified_base 3: mod_base = OTHER; note = 2'-O-methyladenosine-3'-phosphate
  modified_base 4: mod_base = OTHER; note = 2'-O-methylcytidine-3'-phosphate
  modified_base 6: mod_base = OTHER; note = 2'-O-methyluridine-3'-phosphate
  modified_base 8: mod_base = OTHER; note = 2'-O-methyladenosine-3'-phosphate
  modified_base 9: mod_base = OTHER; note = 2'-O-methylguanosine-3'-phosphate
  modified_base 10: mod_base = OTHER; note = 2'-O-methyluridine-3'-phosphate
  modified_base 11: mod_base = OTHER; note = 2'-O-methylguanosine-3'-phosphate
  modified_base 13: mod_base = OTHER; note = 2'-O-methylguanosine-3'-phosphate
  modified_base 14: mod_base = OTHER; note = 2'-fluoroadenosine-3'-phosphate
  modified_base 15: mod_base = OTHER; note = 2'-O-methyluridine-3'-phosphate
  modified_base 16: mod_base = OTHER; note = 2'-O-methylguanosine-3'-phosphate
  modified_base 17: mod_base = OTHER; note = 2'-O-methyladenosine-3'-phosphate
  modified_base 18: mod_base = OTHER; note = 2'-O-methylguanosine-3'-phosphate
  modified_base 19: mod_base = OTHER; note = 2'-O-methylcytidine-3'-phosphate
  modified_base 20: mod_base = OTHER; note = 2'-O-methyladenosine-3'-phosphate
  modified_base 21: mod_base = OTHER; note = 2'-O-methylguanosine-3'-phosphorothioate
  modified_base 22: mod_base = OTHER; note = 2'-O-methylcytidine-3'-phosphorothioate
  modified_base 23: mod_base = OTHER; note = 2'-O-methyladenosine-3'-phosphate
  misc_feature 1: note = RNA
  misc_feature 2: note = DNA
  misc_feature 3..4: note = RNA
  misc_feature 5: note = DNA
  misc_feature 6: note = RNA
  misc_feature 7: note = DNA
  misc_feature 8..11: note = RNA
  misc_feature 12: note = DNA
  misc_feature 13..23: note = RNA
tgacattagtgggatgagcagca

SEQ ID NO: 1008 - DNA, 23 bp, synthetic construct
  source 1..23: mol_type = other DNA
  modified_base 1: mod_base = OTHER; note = Vinyl-phosphonate-2'-O-methyluridine-3'-phosphate
  modified_base 2: mod_base = OTHER; note = 2'-fluoroguanosine-3'-phosphate
  modified_base 3: mod_base = OTHER; note = 2'-O-methyluridine-3'-phosphate
  modified_base 4: mod_base = OTHER; note = 2'-O-methyluridine-3'-phosphate
  modified_base 6: mod_base = OTHER; note = 2'-O-methylcytidine-3'-phosphate
  modified_base 7: mod_base = OTHER; note = Adenosine-glycol nucleic acid (GNA)
  modified_base 8: mod_base = OTHER; note = 2'-O-methylguanosine-3'-phosphate
  modified_base 9: mod_base = OTHER; note = 2'-O-methylcytidine-3'-phosphate
  modified_base 10: mod_base = OTHER; note = 2'-O-methyladenosine-3'-phosphate
  modified_base 11: mod_base = OTHER; note = 2'-O-methyluridine-3'-phosphate
  modified_base 12: mod_base = OTHER; note = 2'-O-methylcytidine-3'-phosphate
  modified_base 13: mod_base = OTHER; note = 2'-O-methyluridine-3'-phosphate
  modified_base 14: mod_base = OTHER; note = 2'-fluoroguanosine-3'-phosphate
  modified_base 15: mod_base = OTHER; note = 2'-O-methyluridine-3'-phosphate
  modified_base 16: mod_base = OTHER; note = 2'-fluoroguanosine-3'-phosphate
  modified_base 17: mod_base = OTHER; note = 2'-O-methyladenosine-3'-phosphate
  modified_base 18: mod_base = OTHER; note = 2'-O-methyluridine-3'-phosphate
  modified_base 19: mod_base = OTHER; note = 2'-O-methylguanosine-3'-phosphate
  modified_base 20: mod_base = OTHER; note = 2'-O-methylguanosine-3'-phosphate
  modified_base 21: mod_base = OTHER; note = 2'-O-methyluridine-3'-phosphorothioate
  modified_base 22: mod_base = OTHER; note = 2'-O-methyluridine-3'-phosphorothioate
  modified_base 23: mod_base = OTHER; note = 2'-O-methylcytidine-3'-phosphate
  misc_feature 1..4: note = RNA
  misc_feature 5: note = DNA
  misc_feature 6..23: note = RNA
tgtttcagcatctgtgatggttc

SEQ ID NO: 1009 - DNA, 23 bp, synthetic construct
  source 1..23: mol_type = other DNA
  modified_base 1: mod_base = OTHER; note = Vinyl-phosphonate-2'-O-methyluridine-3'-phosphate
  modified_base 2: mod_base = OTHER; note = 2'-fluoroadenosine-3'-phosphate
  modified_base 3: mod_base = OTHER; note = 2'-O-methyluridine-3'-phosphate
  modified_base 4: mod_base = OTHER; note = 2'-O-methylguanosine-3'-phosphate
  modified_base 6: mod_base = OTHER; note = 2'-O-methyluridine-3'-phosphate
  modified_base 7: mod_base = OTHER; note = Thymidine-glycol nucleic acid (GNA) S-Isomer
  modified_base 8: mod_base = OTHER; note = 2'-O-methylcytidine-3'-phosphate
  modified_base 9: mod_base = OTHER; note = 2'-O-methyladenosine-3'-phosphate
  modified_base 10: mod_base = OTHER; note = 2'-O-methylguanosine-3'-phosphate
  modified_base 11: mod_base = OTHER; note = 2'-O-methylcytidine-3'-phosphate
  modified_base 12: mod_base = OTHER; note = 2'-O-methyladenosine-3'-phosphate
  modified_base 13: mod_base = OTHER; note = 2'-O-methyluridine-3'-phosphate
  modified_base 14: mod_base = OTHER; note = 2'-fluorocytidine-3'-phosphate
  modified_base 15: mod_base = OTHER; note = 2'-O-methyluridine-3'-phosphate
  modified_base 16: mod_base = OTHER; note = 2'-fluoroguanosine-3'-phosphate
  modified_base 17: mod_base = OTHER; note = 2'-O-methyluridine-3'-phosphate
  modified_base 18: mod_base = OTHER; note = 2'-O-methylguanosine-3'-phosphate
  modified_base 19: mod_base = OTHER; note = 2'-O-methyladenosine-3'-phosphate
  modified_base 20: mod_base = OTHER; note = 2'-O-methyluridine-3'-phosphate
  modified_base 21: mod_base = OTHER; note = 2'-O-methylguanosine-3'-phosphorothioate
  modified_base 22: mod_base = OTHER; note = 2'-O-methylguanosine-3'-phosphorothioate
  modified_base 23: mod_base = OTHER; note = 2'-O-methyluridine-3'-phosphate
  misc_feature 1..4: note = RNA
  misc_feature 5: note = DNA
  misc_feature 6: note = RNA
  misc_feature 7: note = DNA
  misc_feature 8..23: note = RNA
tatgtttcagcatctgtgatggt

SEQ ID NO: 1010 - DNA, 23 bp, synthetic construct
  source 1..23: mol_type = other DNA
  modified_base 1: mod_base = OTHER; note = Vinyl-phosphonate-2'-O-methyluridine-3'-phosphate
  modified_base 3: mod_base = OTHER; note = 2'-O-methyluridine-3'-phosphate
  modified_base 4: mod_base = OTHER; note = 2'-O-methylguanosine-3'-phosphate
  modified_base 6: mod_base = OTHER; note = 2'-O-methyluridine-3'-phosphate
  modified_base 8: mod_base = OTHER; note = 2'-O-methylcytidine-3'-phosphate
  modified_base 9: mod_base = OTHER; note = 2'-O-methyladenosine-3'-phosphate
  modified_base 10: mod_base = OTHER; note = 2'-O-methylguanosine-3'-phosphate
  modified_base 11: mod_base = OTHER; note = 2'-O-methylcytidine-3'-phosphate
  modified_base 13: mod_base = OTHER; note = 2'-O-methyluridine-3'-phosphate
  modified_base 14: mod_base = OTHER; note = 2'-fluorocytidine-3'-phosphate
  modified_base 15: mod_base = OTHER; note = 2'-O-methyluridine-3'-phosphate
  modified_base 16: mod_base = OTHER; note = 2'-O-methylguanosine-3'-phosphate
  modified_base 17: mod_base = OTHER; note = 2'-O-methyluridine-3'-phosphate
  modified_base 18: mod_base = OTHER; note = 2'-O-methylguanosine-3'-phosphate
  modified_base 19: mod_base = OTHER; note = 2'-O-methyladenosine-3'-phosphate
  modified_base 20: mod_base = OTHER; note = 2'-O-methyluridine-3'-phosphate
  modified_base 21: mod_base = OTHER; note = 2'-O-methylguanosine-3'-phosphorothioate
  modified_base 22: mod_base = OTHER; note = 2'-O-methylguanosine-3'-phosphorothioate
  modified_base 23: mod_base = OTHER; note = 2'-O-methyluridine-3'-phosphate
  misc_feature 1: note = RNA
  misc_feature 2: note = DNA
  misc_feature 3..4: note = RNA
  misc_feature 5: note = DNA
  misc_feature 6: note = RNA
  misc_feature 7: note = DNA
  misc_feature 8..11: note = RNA
  misc_feature 12: note = DNA
  misc_feature 13..23: note = RNA
tatgtttcagcatctgtgatggt

SEQ ID NO: 1011 - DNA, 23 bp, synthetic construct
  source 1..23: mol_type = other DNA
  modified_base 1: mod_base = OTHER; note = Vinyl-phosphonate-2'-O-methyluridine-3'-phosphate
  modified_base 2: mod_base = OTHER; note = 2'-fluoroadenosine-3'-phosphate
  modified_base 3: mod_base = OTHER; note = 2'-O-methylcytidine-3'-phosphate
  modified_base 4: mod_base = OTHER; note = 2'-O-methyladenosine-3'-phosphate
  modified_base 6: mod_base = OTHER; note = 2'-O-methylcytidine-3'-phosphate
  modified_base 7: mod_base = OTHER; note = Thymidine-glycol nucleic acid (GNA) S-Isomer
  modified_base 8: mod_base = OTHER; note = 2'-O-methylguanosine-3'-phosphate
  modified_base 9: mod_base = OTHER; note = 2'-O-methylcytidine-3'-phosphate
  modified_base 10: mod_base = OTHER; note = 2'-O-methyladenosine-3'-phosphate
  modified_base 11: mod_base = OTHER; note = 2'-O-methyluridine-3'-phosphate
  modified_base 12: mod_base = OTHER; note = 2'-O-methylguanosine-3'-phosphate
  modified_base 13: mod_base = OTHER; note = 2'-O-methyluridine-3'-phosphate
  modified_base 14: mod_base = OTHER; note = 2'-fluorouridine-3'-phosphate
  modified_base 15: mod_base = OTHER; note = 2'-O-methyluridine-3'-phosphate
  modified_base 16: mod_base = OTHER; note = 2'-fluorocytidine-3'-phosphate
  modified_base 17: mod_base = OTHER; note = 2'-O-methyladenosine-3'-phosphate
  modified_base 18: mod_base = OTHER; note = 2'-O-methylguanosine-3'-phosphate
  modified_base 19: mod_base = OTHER; note = 2'-O-methylcytidine-3'-phosphate
  modified_base 20: mod_base = OTHER; note = 2'-O-methyladenosine-3'-phosphate
  modified_base 21: mod_base = OTHER; note = 2'-O-methyluridine-3'-phosphorothioate
  modified_base 22: mod_base = OTHER; note = 2'-O-methylcytidine-3'-phosphorothioate
  modified_base 23: mod_base = OTHER; note = 2'-O-methyluridine-3'-phosphate
  misc_feature 1..4: note = RNA
  misc_feature 5: note = DNA
  misc_feature 6: note = RNA
  misc_feature 7: note = DNA
  misc_feature 8..23: note = RNA
tacaactgcatgtttcagcatct

SEQ ID NO: 1012 - DNA, 23 bp, synthetic construct
  source 1..23: mol_type = other DNA
  modified_base 1: mod_base = OTHER; note = Vinyl-phosphonate-2'-O-methyluridine-3'-phosphate
  modified_base 3: mod_base = OTHER; note = 2'-O-methylcytidine-3'-phosphate
  modified_base 4: mod_base = OTHER; note = 2'-O-methyladenosine-3'-phosphate
  modified_base 6: mod_base = OTHER; note = 2'-O-methylcytidine-3'-phosphate
  modified_base 8: mod_base = OTHER; note = 2'-O-methylguanosine-3'-phosphate
  modified_base 9: mod_base = OTHER; note = 2'-O-methylcytidine-3'-phosphate
  modified_base 10: mod_base = OTHER; note = 2'-O-methyladenosine-3'-phosphate
  modified_base 11: mod_base = OTHER; note = 2'-O-methyluridine-3'-phosphate
  modified_base 13: mod_base = OTHER; note = 2'-O-methyluridine-3'-phosphate
  modified_base 14: mod_base = OTHER; note = 2'-fluorouridine-3'-phosphate
  modified_base 15: mod_base = OTHER; note = 2'-O-methyluridine-3'-phosphate
  modified_base 16: mod_base = OTHER; note = 2'-O-methylcytidine-3'-phosphate
  modified_base 17: mod_base = OTHER; note = 2'-O-methyladenosine-3'-phosphate
  modified_base 18: mod_base = OTHER; note = 2'-O-methylguanosine-3'-phosphate
  modified_base 19: mod_base = OTHER; note = 2'-O-methylcytidine-3'-phosphate
  modified_base 20: mod_base = OTHER; note = 2'-O-methyladenosine-3'-phosphate
  modified_base 21: mod_base = OTHER; note = 2'-O-methyluridine-3'-phosphorothioate
  modified_base 22: mod_base = OTHER; note = 2'-O-methylcytidine-3'-phosphorothioate
  modified_base 23: mod_base = OTHER; note = 2'-O-methyluridine-3'-phosphate
  misc_feature 1: note = RNA
  misc_feature 2: note = DNA
  misc_feature 3..4: note = RNA
  misc_feature 5: note = DNA
  misc_feature 6: note = RNA
  misc_feature 7: note = DNA
  misc_feature 8..11: note = RNA
  misc_feature 12: note = DNA
  misc_feature 13..23: note = RNA
tacaactgcatgtttcagcatct

SEQ ID NO: 1013 - DNA, 23 bp, synthetic construct
  source 1..23: mol_type = other DNA
  modified_base 1: mod_base = OTHER; note = Vinyl-phosphonate-2'-O-methyluridine-3'-phosphate
  modified_base 2: mod_base = OTHER; note = 2'-fluorouridine-3'-phosphate
  modified_base 3: mod_base = OTHER; note = 2'-O-methylcytidine-3'-phosphate
  modified_base 4: mod_base = OTHER; note = 2'-O-methyladenosine-3'-phosphate
  modified_base 6: mod_base = OTHER; note = 2'-O-methylguanosine-3'-phosphate
  modified_base 7: mod_base = OTHER; note = Thymidine-glycol nucleic acid (GNA) S-Isomer
  modified_base 8: mod_base = OTHER; note = 2'-O-methyluridine-3'-phosphate
  modified_base 9: mod_base = OTHER; note = 2'-O-methyluridine-3'-phosphate
  modified_base 10: mod_base = OTHER; note = 2'-O-methyladenosine-3'-phosphate
  modified_base 11: mod_base = OTHER; note = 2'-O-methylcytidine-3'-phosphate
  modified_base 12: mod_base = OTHER; note = 2'-O-methyladenosine-3'-phosphate
  modified_base 13: mod_base = OTHER; note = 2'-O-methyladenosine-3'-phosphate
  modified_base 14: mod_base = OTHER; note = 2'-fluorocytidine-3'-phosphate
  modified_base 15: mod_base = OTHER; note = 2'-O-methyluridine-3'-phosphate
  modified_base 16: mod_base = OTHER; note = 2'-fluoroguanosine-3'-phosphate
  modified_base 17: mod_base = OTHER; note = 2'-O-methylcytidine-3'-phosphate
  modified_base 18: mod_base = OTHER; note = 2'-O-methyladenosine-3'-phosphate
  modified_base 19: mod_base = OTHER; note = 2'-O-methyluridine-3'-phosphate
  modified_base 20: mod_base = OTHER; note = 2'-O-methylguanosine-3'-phosphate
  modified_base 21: mod_base = OTHER; note = 2'-O-methyluridine-3'-phosphorothioate
  modified_base 22: mod_base = OTHER; note = 2'-O-methyluridine-3'-phosphorothioate
  modified_base 23: mod_base = OTHER; note = 2'-O-methyluridine-3'-phosphate
  misc_feature 1..4: note = RNA
  misc_feature 5: note = DNA
  misc_feature 6: note = RNA
  misc_feature 7: note = DNA
  misc_feature 8..23: note = RNA
ttcaagtttacaactgcatgttt

SEQ ID NO: 1014 - DNA, 23 bp, synthetic construct
  source 1..23: mol_type = other DNA
  modified_base 1: mod_base = OTHER; note = Vinyl-phosphonate-2'-O-methyluridine-3'-phosphate
  modified_base 2: mod_base = OTHER; note = 2'-fluoroadenosine-3'-phosphate
  modified_base 3: mod_base = OTHER; note = 2'-O-methyladenosine-3'-phosphate
  modified_base 4: mod_base = OTHER; note = 2'-O-methyluridine-3'-phosphate
  modified_base 6: mod_base = OTHER; note = 2'-O-methyladenosine-3'-phosphate
  modified_base 7: mod_base = OTHER; note = Adenosine-glycol nucleic acid (GNA)
  modified_base 8: mod_base = OTHER; note = 2'-O-methylguanosine-3'-phosphate
  modified_base 9: mod_base = OTHER; note = 2'-O-methyluridine-3'-phosphate
  modified_base 10: mod_base = OTHER; note = 2'-O-methyluridine-3'-phosphate
  modified_base 11: mod_base = OTHER; note = 2'-O-methyluridine-3'-phosphate
  modified_base 12: mod_base = OTHER; note = 2'-O-methyladenosine-3'-phosphate
  modified_base 13: mod_base = OTHER; note = 2'-O-methylcytidine-3'-phosphate
  modified_base 14: mod_base = OTHER; note = 2'-fluoroadenosine-3'-phosphate
  modified_base 15: mod_base = OTHER; note = 2'-O-methyladenosine-3'-phosphate
  modified_base 16: mod_base = OTHER; note = 2'-fluorocytidine-3'-phosphate
  modified_base 17: mod_base = OTHER; note = 2'-O-methyluridine-3'-phosphate
  modified_base 18: mod_base = OTHER; note = 2'-O-methylguanosine-3'-phosphate
  modified_base 19: mod_base = OTHER; note = 2'-O-methylcytidine-3'-phosphate
  modified_base 20: mod_base = OTHER; note = 2'-O-methyladenosine-3'-phosphate
  modified_base 21: mod_base = OTHER; note = 2'-O-methyluridine-3'-phosphorothioate
  modified_base 22: mod_base = OTHER; note = 2'-O-methylguanosine-3'-phosphorothioate
  modified_base 23: mod_base = OTHER; note = 2'-O-methyluridine-3'-phosphate
  misc_feature 1..4: note = RNA
  misc_feature 5: note = DNA
  misc_feature 6..23: note = RNA
taatcaagtttacaactgcatgt

SEQ ID NO: 1015 - DNA, 23 bp, synthetic construct
  source 1..23: mol_type = other DNA
  modified_base 1: mod_base = OTHER; note = Vinyl-phosphonate-2'-O-methyluridine-3'-phosphate
  modified_base 3: mod_base = OTHER; note = 2'-O-methyladenosine-3'-phosphate
  modified_base 4: mod_base = OTHER; note = 2'-O-methyluridine-3'-phosphate
  modified_base 6: mod_base = OTHER; note = 2'-O-methyladenosine-3'-phosphate
  modified_base 8: mod_base = OTHER; note = 2'-O-methylguanosine-3'-phosphate
  modified_base 9: mod_base = OTHER; note = 2'-O-methyluridine-3'-phosphate
  modified_base 10: mod_base = OTHER; note = 2'-O-methyluridine-3'-phosphate
  modified_base 11: mod_base = OTHER; note = 2'-O-methyluridine-3'-phosphate
  modified_base 13: mod_base = OTHER; note = 2'-O-methylcytidine-3'-phosphate
  modified_base 14: mod_base = OTHER; note = 2'-fluoroadenosine-3'-phosphate
  modified_base 15: mod_base = OTHER; note = 2'-O-methyladenosine-3'-phosphate
  modified_base 16: mod_base = OTHER; note = 2'-O-methylcytidine-3'-phosphate
  modified_base 17: mod_base = OTHER; note = 2'-O-methyluridine-3'-phosphate
  modified_base 18: mod_base = OTHER; note = 2'-O-methylguanosine-3'-phosphate
  modified_base 19: mod_base = OTHER; note = 2'-O-methylcytidine-3'-phosphate
  modified_base 20: mod_base = OTHER; note = 2'-O-methyladenosine-3'-phosphate
  modified_base 21: mod_base = OTHER; note = 2'-O-methyluridine-3'-phosphorothioate
  modified_base 22: mod_base = OTHER; note = 2'-O-methylguanosine-3'-phosphorothioate
  modified_base 23: mod_base = OTHER; note = 2'-O-methyluridine-3'-phosphate
  misc_feature 1: note = RNA
  misc_feature 2: note = DNA
  misc_feature 3..4: note = RNA
  misc_feature 5: note = DNA
  misc_feature 6: note = RNA
  misc_feature 7: note = DNA
  misc_feature 8..11: note = RNA
  misc_feature 12: note = DNA
  misc_feature 13..23: note = RNA
taatcaagtttacaactgcatgt

SEQ ID NO: 1016 - DNA, 23 bp, synthetic construct
  source 1..23: mol_type = other DNA
  modified_base 1: mod_base = OTHER; note = Vinyl-phosphonate-2'-O-methyluridine-3'-phosphate
  modified_base 2: mod_base = OTHER; note = 2'-fluorouridine-3'-phosphate
  modified_base 3: mod_base = OTHER; note = 2'-O-methylcytidine-3'-phosphate
  modified_base 4: mod_base = OTHER; note = 2'-O-methyladenosine-3'-phosphate
  modified_base 6: mod_base = OTHER; note = 2'-O-methyluridine-3'-phosphate
  modified_base 7: mod_base = OTHER; note = Thymidine-glycol nucleic acid (GNA) S-Isomer
  modified_base 8: mod_base = OTHER; note = 2'-O-methylcytidine-3'-phosphate
  modified_base 9: mod_base = OTHER; note = 2'-O-methyladenosine-3'-phosphate
  modified_base 10: mod_base = OTHER; note = 2'-O-methylguanosine-3'-phosphate
  modified_base 11: mod_base = OTHER; note = 2'-O-methylguanosine-3'-phosphate
  modified_base 12: mod_base = OTHER; note = 2'-O-methylguanosine-3'-phosphate
  modified_base 13: mod_base = OTHER; note = 2'-O-methyladenosine-3'-phosphate
  modified_base 14: mod_base = OTHER; note = 2'-fluorouridine-3'-phosphate
  modified_base 15: mod_base = OTHER; note = 2'-O-methyluridine-3'-phosphate
  modified_base 16: mod_base = OTHER; note = 2'-fluoroguanosine-3'-phosphate
  modified_base 17: mod_base = OTHER; note = 2'-O-methylcytidine-3'-phosphate
  modified_base 18: mod_base = OTHER; note = 2'-O-methyladenosine-3'-phosphate
  modified_base 19: mod_base = OTHER; note = 2'-O-methylcytidine-3'-phosphate
  modified_base 20: mod_base = OTHER; note = 2'-O-methylguanosine-3'-phosphate
  modified_base 21: mod_base = OTHER; note = 2'-O-methyluridine-3'-phosphorothioate
  modified_base 22: mod_base = OTHER; note = 2'-O-methylguanosine-3'-phosphorothioate
  modified_base 23: mod_base = OTHER; note = 2'-O-methyluridine-3'-phosphate
  misc_feature 1..4: note = RNA
  misc_feature 5: note = DNA
  misc_feature 6: note = RNA
  misc_feature 7: note = DNA
  misc_feature 8..23: note = RNA
ttcagttcagggattgcacgtgt

SEQ ID NO: 1017 - DNA, 23 bp, synthetic construct
  source 1..23: mol_type = other DNA
  modified_base 1: mod_base = OTHER; note = Vinyl-phosphonate-2'-O-methyluridine-3'-phosphate
  modified_base 2: mod_base = OTHER; note = 2'-fluorouridine-3'-phosphate
  modified_base 3: mod_base = OTHER; note = 2'-O-methyluridine-3'-phosphate
  modified_base 4: mod_base = OTHER; note = 2'-O-methylguanosine-3'-phosphate
  modified_base 6: mod_base = OTHER; note = 2'-O-methylcytidine-3'-phosphate
  modified_base 7: mod_base = OTHER; note = Adenosine-glycol nucleic acid (GNA)
  modified_base 8: mod_base = OTHER; note = 2'-O-methylguanosine-3'-phosphate
  modified_base 9: mod_base = OTHER; note = 2'-O-methyluridine-3'-phosphate
  modified_base 10: mod_base = OTHER; note = 2'-O-methyluridine-3'-phosphate
  modified_base 11: mod_base = OTHER; note = 2'-O-methylcytidine-3'-phosphate
  modified_base 12: mod_base = OTHER; note = 2'-O-methyladenosine-3'-phosphate
  modified_base 13: mod_base = OTHER; note = 2'-O-methylguanosine-3'-phosphate
  modified_base 14: mod_base = OTHER; note = 2'-fluoroguanosine-3'-phosphate
  modified_base 15: mod_base = OTHER; note = 2'-O-methylguanosine-3'-phosphate
  modified_base 16: mod_base = OTHER; note = 2'-fluoroadenosine-3'-phosphate
  modified_base 17: mod_base = OTHER; note = 2'-O-methyluridine-3'-phosphate
  modified_base 18: mod_base = OTHER; note = 2'-O-methyluridine-3'-phosphate
  modified_base 19: mod_base = OTHER; note = 2'-O-methylguanosine-3'-phosphate
  modified_base 20: mod_base = OTHER; note = 2'-O-methylcytidine-3'-phosphate
  modified_base 21: mod_base = OTHER; note = 2'-O-methyladenosine-3'-phosphorothioate
  modified_base 22: mod_base = OTHER; note = 2'-O-methylcytidine-3'-phosphorothioate
  modified_base 23: mod_base = OTHER; note = 2'-O-methylguanosine-3'-phosphate
  misc_feature 1..4: note = RNA
  misc_feature 5: note = DNA
  misc_feature 6..23: note = RNA
tttgtcagttcagggattgcacg

SEQ ID NO: 1018 - DNA, 23 bp, synthetic construct
  source 1..23: mol_type = other DNA
  modified_base 1: mod_base = OTHER; note = Vinyl-phosphonate-2'-O-methyluridine-3'-phosphate
  modified_base 2: mod_base = OTHER; note = 2'-fluorouridine-3'-phosphate
  modified_base 3: mod_base = OTHER; note = 2'-O-methyluridine-3'-phosphate
  modified_base 4: mod_base = OTHER; note = 2'-O-methyladenosine-3'-phosphate
  modified_base 6: mod_base = OTHER; note = 2'-O-methyluridine-3'-phosphate
  modified_base 7: mod_base = OTHER; note = Adenosine-glycol nucleic acid (GNA)
  modified_base 8: mod_base = OTHER; note = 2'-O-methyladenosine-3'-phosphate
  modified_base 9: mod_base = OTHER; note = 2'-O-methylcytidine-3'-phosphate
  modified_base 10: mod_base = OTHER; note = 2'-O-methylcytidine-3'-phosphate
  modified_base 11: mod_base = OTHER; note = 2'-O-methyladenosine-3'-phosphate
  modified_base 12: mod_base = OTHER; note = 2'-O-methylcytidine-3'-phosphate
  modified_base 13: mod_base = OTHER; note = 2'-O-methylcytidine-3'-phosphate
  modified_base 14: mod_base = OTHER; note = 2'-fluoroadenosine-3'-phosphate
  modified_base 15: mod_base = OTHER; note = 2'-O-methylcytidine-3'-phosphate
  modified_base 16: mod_base = OTHER; note = 2'-fluorocytidine-3'-phosphate
  modified_base 17: mod_base = OTHER; note = 2'-O-methyluridine-3'-phosphate
  modified_base 18: mod_base = OTHER; note = 2'-O-methylguanosine-3'-phosphate
  modified_base 19: mod_base = OTHER; note = 2'-O-methylguanosine-3'-phosphate
  modified_base 20: mod_base = OTHER; note = 2'-O-methyluridine-3'-phosphate
  modified_base 21: mod_base = OTHER; note = 2'-O-methylcytidine-3'-phosphorothioate
  modified_base 22: mod_base = OTHER; note = 2'-O-methylcytidine-3'-phosphorothioate
  modified_base 23: mod_base = OTHER; note = 2'-O-methyluridine-3'-phosphate
  misc_feature 1..4: note = RNA
  misc_feature 5: note = DNA
  misc_feature 6..23: note = RNA
tttattaaccaccacctggtcct

SEQ ID NO: 1019 - DNA, 23 bp, synthetic construct
  source 1..23: mol_type = other DNA
  modified_base 1: mod_base = OTHER; note = Vinyl-phosphonate-2'-O-methyluridine-3'-phosphate
  modified_base 3: mod_base = OTHER; note = 2'-O-methyluridine-3'-phosphate
  modified_base 4: mod_base = OTHER; note = 2'-O-methyladenosine-3'-phosphate
  modified_base 6: mod_base = OTHER; note = 2'-O-methyluridine-3'-phosphate
  modified_base 8: mod_base = OTHER; note = 2'-O-methyladenosine-3'-phosphate
  modified_base 9: mod_base = OTHER; note = 2'-O-methylcytidine-3'-phosphate
  modified_base 10: mod_base = OTHER; note = 2'-O-methylcytidine-3'-phosphate
  modified_base 11: mod_base = OTHER; note = 2'-O-methyladenosine-3'-phosphate
  modified_base 13: mod_base = OTHER; note = 2'-O-methylcytidine-3'-phosphate
  modified_base 14: mod_base = OTHER; note = 2'-fluoroadenosine-3'-phosphate
  modified_base 15: mod_base = OTHER; note = 2'-O-methylcytidine-3'-phosphate
  modified_base 16: mod_base = OTHER; note = 2'-O-methylcytidine-3'-phosphate
  modified_base 17: mod_base = OTHER; note = 2'-O-methyluridine-3'-phosphate
  modified_base 18: mod_base = OTHER; note = 2'-O-methylguanosine-3'-phosphate
  modified_base 19: mod_base = OTHER; note = 2'-O-methylguanosine-3'-phosphate
  modified_base 20: mod_base = OTHER; note = 2'-O-methyluridine-3'-phosphate
  modified_base 21: mod_base = OTHER; note = 2'-O-methylcytidine-3'-phosphorothioate
  modified_base 22: mod_base = OTHER; note = 2'-O-methylcytidine-3'-phosphorothioate
  modified_base 23: mod_base = OTHER; note = 2'-O-methyluridine-3'-phosphate
  misc_feature 1: note = RNA
  misc_feature 2: note = DNA
  misc_feature 3..4: note = RNA
  misc_feature 5: note = DNA
  misc_feature 6: note = RNA
  misc_feature 7: note = DNA
  misc_feature 8..11: note = RNA
  misc_feature 12: note = DNA
  misc_feature 13..23: note = RNA
tttattaaccaccacctggtcct

SEQ ID NO: 1020 - DNA, 23 bp, synthetic construct
  source 1..23: mol_type = other DNA
  modified_base 1: mod_base = OTHER; note = Vinyl-phosphonate-2'-O-methyluridine-3'-phosphate
  modified_base 3: mod_base = OTHER; note = 2'-O-methylcytidine-3'-phosphate
  modified_base 4: mod_base = OTHER; note = 2'-O-methyluridine-3'-phosphate
  modified_base 6: mod_base = OTHER; note = 2'-O-methyladenosine-3'-phosphate
  modified_base 8: mod_base = OTHER; note = 2'-O-methyluridine-3'-phosphate
  modified_base 9: mod_base = OTHER; note = 2'-O-methyladenosine-3'-phosphate
  modified_base 10: mod_base = OTHER; note = 2'-O-methyladenosine-3'-phosphate
  modified_base 11: mod_base = OTHER; note = 2'-O-methylcytidine-3'-phosphate
  modified_base 13: mod_base = OTHER; note = 2'-O-methyladenosine-3'-phosphate
  modified_base 14: mod_base = OTHER; note = 2'-fluorocytidine-3'-phosphate
  modified_base 15: mod_base = OTHER; note = 2'-O-methylcytidine-3'-phosphate
  modified_base 16: mod_base = OTHER; note = 2'-O-methyladenosine-3'-phosphate
  modified_base 17: mod_base = OTHER; note = 2'-O-methylcytidine-3'-phosphate
  modified_base 18: mod_base = OTHER; note = 2'-O-methylcytidine-3'-phosphate
  modified_base 19: mod_base = OTHER; note = 2'-O-methyluridine-3'-phosphate
  modified_base 20: mod_base = OTHER; note = 2'-O-methylguanosine-3'-phosphate
  modified_base 21: mod_base = OTHER; note = 2'-O-methylguanosine-3'-phosphorothioate
  modified_base 22: mod_base = OTHER; note = 2'-O-methyluridine-3'-phosphorothioate
  modified_base 23: mod_base = OTHER; note = 2'-O-methylcytidine-3'-phosphate
  misc_feature 1: note = RNA
  misc_feature 2: note = DNA
  misc_feature 3..4: note = RNA
  misc_feature 5: note = DNA
  misc_feature 6: note = RNA
  misc_feature 7: note = DNA
  misc_feature 8..11: note = RNA
  misc_feature 12: note = DNA
  misc_feature 13..23: note = RNA
tccttattaaccaccacctggtc

SEQ ID NO: 1021 - DNA, 23 bp, synthetic construct
  source 1..23: mol_type = other DNA
  modified_base 1: mod_base = OTHER; note = Vinyl-phosphonate-2'-O-methyluridine-3'-phosphate
  modified_base 2: mod_base = OTHER; note = 2'-fluoroadenosine-3'-phosphate
  modified_base 3: mod_base = OTHER; note = 2'-O-methyluridine-3'-phosphate
  modified_base 4: mod_base = OTHER; note = 2'-O-methyladenosine-3'-phosphate
  modified_base 6: mod_base = OTHER; note = 2'-O-methylcytidine-3'-phosphate
  modified_base 7: mod_base = OTHER; note = Thymidine-glycol nucleic acid (GNA) S-Isomer
  modified_base 8: mod_base = OTHER; note = 2'-O-methylguanosine-3'-phosphate
  modified_base 9: mod_base = OTHER; note = 2'-O-methylcytidine-3'-phosphate
  modified_base 10: mod_base = OTHER; note = 2'-O-methyladenosine-3'-phosphate
  modified_base 11: mod_base = OTHER; note = 2'-O-methylguanosine-3'-phosphate
  modified_base 12: mod_base = OTHER; note = 2'-O-methylcytidine-3'-phosphate
  modified_base 13: mod_base = OTHER; note = 2'-O-methylcytidine-3'-phosphate
  modified_base 14: mod_base = OTHER; note = 2'-fluorouridine-3'-phosphate
  modified_base 15: mod_base = OTHER; note = 2'-O-methyluridine-3'-phosphate
  modified_base 16: mod_base = OTHER; note = 2'-fluoroadenosine-3'-phosphate
  modified_base 17: mod_base = OTHER; note = 2'-O-methyluridine-3'-phosphate
  modified_base 18: mod_base = OTHER; note = 2'-O-methyluridine-3'-phosphate
  modified_base 19: mod_base = OTHER; note = 2'-O-methyladenosine-3'-phosphate
  modified_base 20: mod_base = OTHER; note = 2'-O-methyladenosine-3'-phosphate
  modified_base 21: mod_base = OTHER; note = 2'-O-methylcytidine-3'-phosphorothioate
  modified_base 22: mod_base = OTHER; note = 2'-O-methylcytidine-3'-phosphorothioate
  modified_base 23: mod_base = OTHER; note = 2'-O-methyladenosine-3'-phosphate
  misc_feature 1..4: note = RNA
  misc_feature 5: note = DNA
  misc_feature 6: note = RNA
  misc_feature 7: note = DNA
  misc_feature 8..23: note = RNA
tataactgcagccttattaacca

SEQ ID NO: 1022 - DNA, 23 bp, synthetic construct
  source 1..23: mol_type = other DNA
  modified_base 1: mod_base = OTHER; note = Vinyl-phosphonate-2'-O-methyluridine-3'-phosphate
  modified_base 2: mod_base = OTHER; note = 2'-fluoroadenosine-3'-phosphate
  modified_base 3: mod_base = OTHER; note = 2'-O-methyluridine-3'-phosphate
  modified_base 4: mod_base = OTHER; note = 2'-O-methyladenosine-3'-phosphate
  modified_base 6: mod_base = OTHER; note = 2'-O-methylcytidine-3'-phosphate
  modified_base 7: mod_base = OTHER; note = Adenosine-glycol nucleic acid (GNA)
  modified_base 8: mod_base = OTHER; note = 2'-O-methylguanosine-3'-phosphate
  modified_base 9: mod_base = OTHER; note = 2'-O-methyladenosine-3'-phosphate
  modified_base 10: mod_base = OTHER; note = 2'-O-methylcytidine-3'-phosphate
  modified_base 11: mod_base = OTHER; note = 2'-O-methyladenosine-3'-phosphate
  modified_base 12: mod_base = OTHER; note = 2'-O-methylcytidine-3'-phosphate
  modified_base 13: mod_base = OTHER; note = 2'-O-methylcytidine-3'-phosphate
  modified_base 14: mod_base = OTHER; note = 2'-fluoroadenosine-3'-phosphate
  modified_base 15: mod_base = OTHER; note = 2'-O-methyluridine-3'-phosphate
  modified_base 16: mod_base = OTHER; note = 2'-fluorocytidine-3'-phosphate
  modified_base 17: mod_base = OTHER; note = 2'-O-methyluridine-3'-phosphate
  modified_base 18: mod_base = OTHER; note = 2'-O-methylguanosine-3'-phosphate
  modified_base 19: mod_base = OTHER; note = 2'-O-methyladenosine-3'-phosphate
  modified_base 20: mod_base = OTHER; note = 2'-O-methylguanosine-3'-phosphate
  modified_base 21: mod_base = OTHER; note = 2'-O-methylguanosine-3'-phosphorothioate
  modified_base 22: mod_base = OTHER; note = 2'-O-methyladenosine-3'-phosphorothioate
  modified_base 23: mod_base = OTHER; note = 2'-O-methylguanosine-3'-phosphate
  misc_feature 1..4: note = RNA
  misc_feature 5: note = DNA
  misc_feature 6..23: note = RNA
tatagcagacaccatctgaggag

SEQ ID NO: 1023 - DNA, 23 bp, synthetic construct
  source 1..23: mol_type = other DNA
  modified_base 1: mod_base = OTHER; note = Vinyl-phosphonate-2'-O-methyluridine-3'-phosphate
  modified_base 3: mod_base = OTHER; note = 2'-O-methyladenosine-3'-phosphate
  modified_base 4: mod_base = OTHER; note = 2'-O-methyladenosine-3'-phosphate
  modified_base 6: mod_base = OTHER; note = 2'-O-methyladenosine-3'-phosphate
  modified_base 8: mod_base = OTHER; note = 2'-O-methylcytidine-3'-phosphate
  modified_base 9: mod_base = OTHER; note = 2'-O-methyladenosine-3'-phosphate
  modified_base 10: mod_base = OTHER; note = 2'-O-methylguanosine-3'-phosphate
  modified_base 11: mod_base = OTHER; note = 2'-O-methyladenosine-3'-phosphate
  modified_base 13: mod_base = OTHER; note = 2'-O-methyladenosine-3'-phosphate
  modified_base 14: mod_base = OTHER; note = 2'-fluorocytidine-3'-phosphate
  modified_base 15: mod_base = OTHER; note = 2'-O-methylcytidine-3'-phosphate
  modified_base 16: mod_base = OTHER; note = 2'-O-methyladenosine-3'-phosphate
  modified_base 17: mod_base = OTHER; note = 2'-O-methyluridine-3'-phosphate
  modified_base 18: mod_base = OTHER; note = 2'-O-methylcytidine-3'-phosphate
  modified_base 19: mod_base = OTHER; note = 2'-O-methyluridine-3'-phosphate
  modified_base 20: mod_base = OTHER; note = 2'-O-methylguanosine-3'-phosphate
  modified_base 21: mod_base = OTHER; note = 2'-O-methyladenosine-3'-phosphorothioate
  modified_base 22: mod_base = OTHER; note = 2'-O-methylguanosine-3'-phosphorothioate
  modified_base 23: mod_base = OTHER; note = 2'-O-methylguanosine-3'-phosphate
  misc_feature 1: note = RNA
  misc_feature 2: note = DNA
  misc_feature 3..4: note = RNA
  misc_feature 5: note = DNA
  misc_feature 6: note = RNA
  misc_feature 7: note = DNA
  misc_feature 8..11: note = RNA
  misc_feature 12: note = DNA
  misc_feature 13..23: note = RNA
tcaatagcagacaccatctgagg

SEQ ID NO: 1024 - DNA, 23 bp, synthetic construct
  source 1..23: mol_type = other DNA
  modified_base 1: mod_base = OTHER; note = Vinyl-phosphonate-2'-O-methyluridine-3'-phosphate
  modified_base 2: mod_base = OTHER; note = 2'-fluorouridine-3'-phosphate
  modified_base 3: mod_base = OTHER; note = 2'-O-methyladenosine-3'-phosphate
  modified_base 4: mod_base = OTHER; note = 2'-O-methylcytidine-3'-phosphate
  modified_base 6: mod_base = OTHER; note = 2'-O-methyladenosine-3'-phosphate
  modified_base 7: mod_base = OTHER; note = Thymidine-glycol nucleic acid (GNA) S-Isomer
  modified_base 8: mod_base = OTHER; note = 2'-O-methyladenosine-3'-phosphate
  modified_base 9: mod_base = OTHER; note = 2'-O-methylguanosine-3'-phosphate
  modified_base 10: mod_base = OTHER; note = 2'-O-methylcytidine-3'-phosphate
  modified_base 11: mod_base = OTHER; note = 2'-O-methyladenosine-3'-phosphate
  modified_base 12: mod_base = OTHER; note = 2'-O-methylguanosine-3'-phosphate
  modified_base 13: mod_base = OTHER; note = 2'-O-methyladenosine-3'-phosphate
  modified_base 14: mod_base = OTHER; note = 2'-fluorocytidine-3'-phosphate
  modified_base 15: mod_base = OTHER; note = 2'-O-methyladenosine-3'-phosphate
  modified_base 16: mod_base = OTHER; note = 2'-fluorocytidine-3'-phosphate
  modified_base 17: mod_base = OTHER; note = 2'-O-methylcytidine-3'-phosphate
  modified_base 18: mod_base = OTHER; note = 2'-O-methyladenosine-3'-phosphate
  modified_base 19: mod_base = OTHER; note = 2'-O-methyluridine-3'-phosphate
  modified_base 20: mod_base = OTHER; note = 2'-O-methylcytidine-3'-phosphate
  modified_base 21: mod_base = OTHER; note = 2'-O-methyluridine-3'-phosphorothioate
  modified_base 22: mod_base = OTHER; note = 2'-O-methylguanosine-3'-phosphorothioate
  modified_base 23: mod_base = OTHER; note = 2'-O-methyladenosine-3'-phosphate
  misc_feature 1..4: note = RNA
  misc_feature 5: note = DNA
  misc_feature 6: note = RNA
  misc_feature 7: note = DNA
  misc_feature 8..23: note = RNA
ttacaatagcagacaccatctga

SEQ ID NO: 1025 - DNA, 23 bp, synthetic construct
  source 1..23: mol_type = other DNA
  modified_base 1: mod_base = OTHER; note = Vinyl-phosphonate-2'-O-methyluridine-3'-phosphate
  modified_base 3: mod_base = OTHER; note = 2'-O-methyladenosine-3'-phosphate
  modified_base 4: mod_base = OTHER; note = 2'-O-methylcytidine-3'-phosphate
  modified_base 6: mod_base = OTHER; note = 2'-O-methyladenosine-3'-phosphate
  modified_base 8: mod_base = OTHER; note = 2'-O-methyladenosine-3'-phosphate
  modified_base 9: mod_base = OTHER; note = 2'-O-methylguanosine-3'-phosphate
  modified_base 10: mod_base = OTHER; note = 2'-O-methylcytidine-3'-phosphate
  modified_base 11: mod_base = OTHER; note = 2'-O-methyladenosine-3'-phosphate
  modified_base 13: mod_base = OTHER; note = 2'-O-methyladenosine-3'-phosphate
  modified_base 14: mod_base = OTHER; note = 2'-fluorocytidine-3'-phosphate
  modified_base 15: mod_base = OTHER; note = 2'-O-methyladenosine-3'-phosphate
  modified_base 16: mod_base = OTHER; note = 2'-O-methylcytidine-3'-phosphate
  modified_base 17: mod_base = OTHER; note = 2'-O-methylcytidine-3'-phosphate
  modified_base 18: mod_base = OTHER; note = 2'-O-methyladenosine-3'-phosphate
  modified_base 19: mod_base = OTHER; note = 2'-O-methyluridine-3'-phosphate
  modified_base 20: mod_base = OTHER; note = 2'-O-methylcytidine-3'-phosphate
  modified_base 21: mod_base = OTHER; note = 2'-O-methyluridine-3'-phosphorothioate
  modified_base 22: mod_base = OTHER; note = 2'-O-methylguanosine-3'-phosphorothioate
  modified_base 23: mod_base = OTHER; note = 2'-O-methyladenosine-3'-phosphate
  misc_feature 1: note = RNA
  misc_feature 2: note = DNA
  misc_feature 3..4: note = RNA
  misc_feature 5: note = DNA
  misc_feature 6: note = RNA
  misc_feature 7: note = DNA
  misc_feature 8..11: note = RNA
  misc_feature 12: note = DNA
  misc_feature 13..23: note = RNA
ttacaatagcagacaccatctga

SEQ ID NO: 1026 - DNA, 23 bp, synthetic construct
  source 1..23: mol_type = other DNA
  modified_base 1: mod_base = OTHER; note = Vinyl-phosphonate-2'-O-methyluridine-3'-phosphate
  modified_base 2: mod_base = OTHER; note = 2'-fluorouridine-3'-phosphate
  modified_base 3: mod_base = OTHER; note = 2'-O-methyluridine-3'-phosphate
  modified_base 4: mod_base = OTHER; note = 2'-O-methylguanosine-3'-phosphate
  modified_base 6: mod_base = OTHER; note = 2'-O-methyladenosine-3'-phosphate
  modified_base 7: mod_base = OTHER; note = Thymidine-glycol nucleic acid (GNA) S-Isomer
  modified_base 8: mod_base = OTHER; note = 2'-O-methyluridine-3'-phosphate
  modified_base 9: mod_base = OTHER; note = 2'-O-methylcytidine-3'-phosphate
  modified_base 10: mod_base = OTHER; note = 2'-O-methyluridine-3'-phosphate
  modified_base 11: mod_base = OTHER; note = 2'-O-methylguanosine-3'-phosphate
  modified_base 12: mod_base = OTHER; note = 2'-O-methylcytidine-3'-phosphate
  modified_base 13: mod_base = OTHER; note = 2'-O-methyladenosine-3'-phosphate
  modified_base 14: mod_base = OTHER; note = 2'-fluorouridine-3'-phosphate
  modified_base 15: mod_base = OTHER; note = 2'-O-methylguanosine-3'-phosphate
  modified_base 16: mod_base = OTHER; note = 2'-fluoroguanosine-3'-phosphate
  modified_base 17: mod_base = OTHER; note = 2'-O-methyluridine-3'-phosphate
  modified_base 18: mod_base = OTHER; note = 2'-O-methyladenosine-3'-phosphate
  modified_base 19: mod_base = OTHER; note = 2'-O-methylcytidine-3'-phosphate
  modified_base 20: mod_base = OTHER; note = 2'-O-methylguanosine-3'-phosphate
  modified_base 21: mod_base = OTHER; note = 2'-O-methyluridine-3'-phosphorothioate
  modified_base 22: mod_base = OTHER; note = 2'-O-methyladenosine-3'-phosphorothioate
  modified_base 23: mod_base = OTHER; note = 2'-O-methylcytidine-3'-phosphate
  misc_feature 1..4: note = RNA
  misc_feature 5: note = DNA
  misc_feature 6: note = RNA
  misc_feature 7: note = DNA
  misc_feature 8..23: note = RNA
tttgtattctgcatggtacgtac

SEQ ID NO: 1027 - DNA, 23 bp, synthetic construct
  source 1..23: mol_type = other DNA
  modified_base 1: mod_base = OTHER; note = Vinyl-phosphonate-2'-O-methyluridine-3'-phosphate
  modified_base 3: mod_base = OTHER; note = 2'-O-methyluridine-3'-phosphate
  modified_base 4: mod_base = OTHER; note = 2'-O-methylguanosine-3'-phosphate
  modified_base 6: mod_base = OTHER; note = 2'-O-methyladenosine-3'-phosphate
  modified_base 8: mod_base = OTHER; note = 2'-O-methyluridine-3'-phosphate
  modified_base 9: mod_base = OTHER; note = 2'-O-methylcytidine-3'-phosphate
  modified_base 10: mod_base = OTHER; note = 2'-O-methyluridine-3'-phosphate
  modified_base 11: mod_base = OTHER; note = 2'-O-methylguanosine-3'-phosphate
  modified_base 13: mod_base = OTHER; note = 2'-O-methyladenosine-3'-phosphate
  modified_base 14: mod_base = OTHER; note = 2'-fluorouridine-3'-phosphate
  modified_base 15: mod_base = OTHER; note = 2'-O-methylguanosine-3'-phosphate
  modified_base 16: mod_base = OTHER; note = 2'-O-methylguanosine-3'-phosphate
  modified_base 17: mod_base = OTHER; note = 2'-O-methyluridine-3'-phosphate
  modified_base 18: mod_base = OTHER; note = 2'-O-methyladenosine-3'-phosphate
  modified_base 19: mod_base = OTHER; note = 2'-O-methylcytidine-3'-phosphate
  modified_base 20: mod_base = OTHER; note = 2'-O-methylguanosine-3'-phosphate
  modified_base 21: mod_base = OTHER; note = 2'-O-methyluridine-3'-phosphorothioate
  modified_base 22: mod_base = OTHER; note = 2'-O-methyladenosine-3'-phosphorothioate
  modified_base 23: mod_base = OTHER; note = 2'-O-methylcytidine-3'-phosphate
  misc_feature 1: note = RNA
  misc_feature 2: note = DNA
  misc_feature 3..4: note = RNA
  misc_feature 5: note = DNA
  misc_feature 6: note = RNA
  misc_feature 7: note = DNA
  misc_feature 8..11: note = RNA
  misc_feature 12: note = DNA
  misc_feature 13..23: note = RNA
tttgtattctgcatggtacgtac

SEQ ID NO: 1028 - DNA, 23 bp, synthetic construct
  source 1..23: mol_type = other DNA
  modified_base 1: mod_base = OTHER; note = Vinyl-phosphonate-2'-O-methyluridine-3'-phosphate
  modified_base 2: mod_base = OTHER; note = 2'-fluorouridine-3'-phosphate
  modified_base 3: mod_base = OTHER; note = 2'-O-methyluridine-3'-phosphate
  modified_base 4: mod_base = OTHER; note = 2'-O-methyluridine-3'-phosphate
  modified_base 6: mod_base = OTHER; note = 2'-O-methyluridine-3'-phosphate
  modified_base 7: mod_base = OTHER; note = Adenosine-glycol nucleic acid (GNA)
  modified_base 8: mod_base = OTHER; note = 2'-O-methyluridine-3'-phosphate
  modified_base 9: mod_base = OTHER; note = 2'-O-methyluridine-3'-phosphate
  modified_base 10: mod_base = OTHER; note = 2'-O-methylcytidine-3'-phosphate
  modified_base 11: mod_base = OTHER; note = 2'-O-methyluridine-3'-phosphate
  modified_base 12: mod_base = OTHER; note = 2'-O-methylguanosine-3'-phosphate
  modified_base 13: mod_base = OTHER; note = 2'-O-methylcytidine-3'-phosphate
  modified_base 14: mod_base = OTHER; note = 2'-fluoroadenosine-3'-phosphate
  modified_base 15: mod_base = OTHER; note = 2'-O-methyluridine-3'-phosphate
  modified_base 16: mod_base = OTHER; note = 2'-fluoroguanosine-3'-phosphate
  modified_base 17: mod_base = OTHER; note = 2'-O-methylguanosine-3'-phosphate
  modified_base 18: mod_base = OTHER; note = 2'-O-methyluridine-3'-phosphate
  modified_base 19: mod_base = OTHER; note = 2'-O-methyladenosine-3'-phosphate
  modified_base 20: mod_base = OTHER; note = 2'-O-methylcytidine-3'-phosphate
  modified_base 21: mod_base = OTHER; note = 2'-O-methylguanosine-3'-phosphorothioate
  modified_base 22: mod_base = OTHER; note = 2'-O-methyluridine-3'-phosphorothioate
  modified_base 23: mod_base = OTHER; note = 2'-O-methyladenosine-3'-phosphate
  misc_feature 1..4: note = RNA
  misc_feature 5: note = DNA
  misc_feature 6..23: note = RNA
ttttgtattctgcatggtacgta

SEQ ID NO: 1029 - DNA, 23 bp, synthetic construct
  source 1..23: mol_type = other DNA
  modified_base 1: mod_base = OTHER; note = Vinyl-phosphonate-2'-O-methyluridine-3'-phosphate
  modified_base 2: mod_base = OTHER; note = 2'-fluoroadenosine-3'-phosphate
  modified_base 3: mod_base = OTHER; note = 2'-O-methyluridine-3'-phosphate
  modified_base 4: mod_base = OTHER; note = 2'-O-methyluridine-3'-phosphate
  modified_base 6: mod_base = OTHER; note = 2'-O-methylguanosine-3'-phosphate
  modified_base 7: mod_base = OTHER; note = Thymidine-glycol nucleic acid (GNA) S-Isomer
  modified_base 8: mod_base = OTHER; note = 2'-O-methyladenosine-3'-phosphate
  modified_base 9: mod_base = OTHER; note = 2'-O-methyluridine-3'-phosphate
  modified_base 10: mod_base = OTHER; note = 2'-O-methyluridine-3'-phosphate
  modified_base 11: mod_base = OTHER; note = 2'-O-methylcytidine-3'-phosphate
  modified_base 12: mod_base = OTHER; note = 2'-O-methyluridine-3'-phosphate
  modified_base 13: mod_base = OTHER; note = 2'-O-methylguanosine-3'-phosphate
  modified_base 14: mod_base = OTHER; note = 2'-fluorocytidine-3'-phosphate
  modified_base 15: mod_base = OTHER; note = 2'-O-methyladenosine-3'-phosphate
  modified_base 16: mod_base = OTHER; note = 2'-fluorouridine-3'-phosphate
  modified_base 17: mod_base = OTHER; note = 2'-O-methylguanosine-3'-phosphate
  modified_base 18: mod_base = OTHER; note = 2'-O-methylguanosine-3'-phosphate
  modified_base 19: mod_base = OTHER; note = 2'-O-methyluridine-3'-phosphate
  modified_base 20: mod_base = OTHER; note = 2'-O-methyladenosine-3'-phosphate
  modified_base 21: mod_base = OTHER; note = 2'-O-methylcytidine-3'-phosphorothioate
  modified_base 22: mod_base = OTHER; note = 2'-O-methylguanosine-3'-phosphorothioate
  modified_base 23: mod_base = OTHER; note = 2'-O-methyluridine-3'-phosphate
  misc_feature 1..4: note = RNA
  misc_feature 5: note = DNA
  misc_feature 6: note = RNA
  misc_feature 7: note = DNA
  misc_feature 8..23: note = RNA
tatttgtattctgcatggtacgt

SEQ ID NO: 1030 - DNA, 23 bp, synthetic construct
  source 1..23: mol_type = other DNA
  modified_base 1: mod_base = OTHER; note = Vinyl-phosphonate-2'-O-methyluridine-3'-phosphate
  modified_base 3: mod_base = OTHER; note = 2'-O-methyladenosine-3'-phosphate
  modified_base 4: mod_base = OTHER; note = 2'-O-methyluridine-3'-phosphate
  modified_base 6: mod_base = OTHER; note = 2'-O-methyluridine-3'-phosphate
  modified_base 8: mod_base = OTHER; note = 2'-O-methyluridine-3'-phosphate
  modified_base 9: mod_base = OTHER; note = 2'-O-methyladenosine-3'-phosphate
  modified_base 10: mod_base = OTHER; note = 2'-O-methyluridine-3'-phosphate
  modified_base 11: mod_base = OTHER; note = 2'-O-methyluridine-3'-phosphate
  modified_base 13: mod_base = OTHER; note = 2'-O-methyluridine-3'-phosphate
  modified_base 14: mod_base = OTHER; note = 2'-fluoroguanosine-3'-phosphate
  modified_base 15: mod_base = OTHER; note = 2'-O-methylcytidine-3'-phosphate
  modified_base 16: mod_base = OTHER; note = 2'-O-methyladenosine-3'-phosphate
  modified_base 17: mod_base = OTHER; note = 2'-O-methyluridine-3'-phosphate
  modified_base 18: mod_base = OTHER; note = 2'-O-methylguanosine-3'-phosphate
  modified_base 19: mod_base = OTHER; note = 2'-O-methylguanosine-3'-phosphate
  modified_base 20: mod_base = OTHER; note = 2'-O-methyluridine-3'-phosphate
  modified_base 21: mod_base = OTHER; note = 2'-O-methyladenosine-3'-phosphorothioate
  modified_base 22: mod_base = OTHER; note = 2'-O-methylcytidine-3'-phosphorothioate
  modified_base 23: mod_base = OTHER; note = 2'-O-methylguanosine-3'-phosphate
  misc_feature 1: note = RNA
  misc_feature 2: note = DNA
  misc_feature 3..4: note = RNA
  misc_feature 5: note = DNA
  misc_feature 6: note = RNA
  misc_feature 7: note = DNA
  misc_feature 8..11: note = RNA
  misc_feature 12: note = DNA
  misc_feature 13..23: note = RNA
tcatttgtattctgcatggtacg

SEQ ID NO: 1031 - DNA, 23 bp, synthetic construct
  source 1..23: mol_type = other DNA
  modified_base 1: mod_base = OTHER; note = Vinyl-phosphonate-2'-O-methyluridine-3'-phosphate
  modified_base 3: mod_base = OTHER; note = 2'-O-methylcytidine-3'-phosphate
  modified_base 4: mod_base = OTHER; note = 2'-O-methyladenosine-3'-phosphate
  modified_base 6: mod_base = OTHER; note = 2'-O-methyluridine-3'-phosphate
  modified_base 8: mod_base = OTHER; note = 2'-O-methylguanosine-3'-phosphate
  modified_base 9: mod_base = OTHER; note = 2'-O-methyluridine-3'-phosphate
  modified_base 10: mod_base = OTHER; note = 2'-O-methyladenosine-3'-phosphate
  modified_base 11: mod_base = OTHER; note = 2'-O-methyluridine-3'-phosphate
  modified_base 13: mod_base = OTHER; note = 2'-O-methylcytidine-3'-phosphate
  modified_base 14: mod_base = OTHER; note = 2'-fluorouridine-3'-phosphate
  modified_base 15: mod_base = OTHER; note = 2'-O-methylguanosine-3'-phosphate
  modified_base 16: mod_base = OTHER; note = 2'-O-methylcytidine-3'-phosphate
  modified_base 17: mod_base = OTHER; note = 2'-O-methyladenosine-3'-phosphate
  modified_base 18: mod_base = OTHER; note = 2'-O-methyluridine-3'-phosphate
  modified_base 19: mod_base = OTHER; note = 2'-O-methylguanosine-3'-phosphate
  modified_base 20: mod_base = OTHER; note = 2'-O-methylguanosine-3'-phosphate
  modified_base 21: mod_base = OTHER; note = 2'-O-methyluridine-3'-phosphorothioate
  modified_base 22: mod_base = OTHER; note = 2'-O-methyladenosine-3'-phosphorothioate
  modified_base 23: mod_base = OTHER; note = 2'-O-methylcytidine-3'-phosphate
  misc_feature 1: note = RNA
  misc_feature 2: note = DNA
  misc_feature 3..4: note = RNA
  misc_feature 5: note = DNA
  misc_feature 6: note = RNA
  misc_feature 7: note = DNA
  misc_feature 8..11: note = RNA
  misc_feature 12: note = DNA
  misc_feature 13..23: note = RNA
ttcatttgtattctgcatggtac

SEQ ID NO: 1032 - DNA, 23 bp, synthetic construct
  source 1..23: mol_type = other DNA
  modified_base 1: mod_base = OTHER; note = Vinyl-phosphonate-2'-O-methyluridine-3'-phosphate
  modified_base 3: mod_base = OTHER; note = 2'-O-methyluridine-3'-phosphate
  modified_base 4: mod_base = OTHER; note = 2'-O-methylcytidine-3'-phosphate
  modified_base 6: mod_base = OTHER; note = 2'-O-methyluridine-3'-phosphate
  modified_base 8: mod_base = OTHER; note = 2'-O-methyluridine-3'-phosphate
  modified_base 9: mod_base = OTHER; note = 2'-O-methylguanosine-3'-phosphate
  modified_base 10: mod_base = OTHER; note = 2'-O-methyluridine-3'-phosphate
  modified_base 11: mod_base = OTHER; note = 2'-O-methyladenosine-3'-phosphate
  modified_base 13: mod_base = OTHER; note = 2'-O-methyluridine-3'-phosphate
  modified_base 14: mod_base = OTHER; note = 2'-fluorocytidine-3'-phosphate
  modified_base 15: mod_base = OTHER; note = 2'-O-methyluridine-3'-phosphate
  modified_base 16: mod_base = OTHER; note = 2'-O-methylguanosine-3'-phosphate
  modified_base 17: mod_base = OTHER; note = 2'-O-methylcytidine-3'-phosphate
  modified_base 18: mod_base = OTHER; note = 2'-O-methyladenosine-3'-phosphate
  modified_base 19: mod_base = OTHER; note = 2'-O-methyluridine-3'-phosphate
  modified_base 20: mod_base = OTHER; note = 2'-O-methylguanosine-3'-phosphate
  modified_base 21: mod_base = OTHER; note = 2'-O-methylguanosine-3'-phosphorothioate
  modified_base 22: mod_base = OTHER; note = 2'-O-methyluridine-3'-phosphorothioate
  modified_base 23: mod_base = OTHER; note = 2'-O-methyladenosine-3'-phosphate
  misc_feature 1: note = RNA
  misc_feature 2: note = DNA
  misc_feature 3..4: note = RNA
  misc_feature 5: note = DNA
  misc_feature 6: note = RNA
  misc_feature 7: note = DNA
  misc_feature 8..11: note = RNA
  misc_feature 12: note = DNA
  misc_feature 13..23: note = RNA
tatcatttgtattctgcatggta

SEQ ID NO: 1033 - DNA, 23 bp, synthetic construct
  source 1..23: mol_type = other DNA
  modified_base 1: mod_base = OTHER; note = Vinyl-phosphonate-2'-O-methyluridine-3'-phosphate
  modified_base 3: mod_base = OTHER; note = 2'-O-methyladenosine-3'-phosphate
  modified_base 4: mod_base = OTHER; note = 2'-O-methyluridine-3'-phosphate
  modified_base 6: mod_base = OTHER; note = 2'-O-methyladenosine-3'-phosphate
  modified_base 8: mod_base = OTHER; note = 2'-O-methyluridine-3'-phosphate
  modified_base 9: mod_base = OTHER; note = 2'-O-methyluridine-3'-phosphate
  modified_base 10: mod_base = OTHER; note = 2'-O-methylguanosine-3'-phosphate
  modified_base 11: mod_base = OTHER; note = 2'-O-methyluridine-3'-phosphate
  modified_base 13: mod_base = OTHER; note = 2'-O-methyluridine-3'-phosphate
  modified_base 14: mod_base = OTHER; note = 2'-fluorouridine-3'-phosphate
  modified_base 15: mod_base = OTHER; note = 2'-O-methylcytidine-3'-phosphate
  modified_base 16: mod_base = OTHER; note = 2'-O-methyluridine-3'-phosphate
  modified_base 17: mod_base = OTHER; note = 2'-O-methylguanosine-3'-phosphate
  modified_base 18: mod_base = OTHER; note = 2'-O-methylcytidine-3'-phosphate
  modified_base 19: mod_base = OTHER; note = 2'-O-methyladenosine-3'-phosphate
  modified_base 20: mod_base = OTHER; note = 2'-O-methyluridine-3'-phosphate
  modified_base 21: mod_base = OTHER; note = 2'-O-methylguanosine-3'-phosphorothioate
  modified_base 22: mod_base = OTHER; note = 2'-O-methylguanosine-3'-phosphorothioate
  modified_base 23: mod_base = OTHER; note = 2'-O-methyluridine-3'-phosphate
  misc_feature 1: note = RNA
  misc_feature 2: note = DNA
  misc_feature 3..4: note = RNA
  misc_feature 5: note = DNA
  misc_feature 6: note = RNA
  misc_feature 7: note = DNA
  misc_feature 8..11: note = RNA
  misc_feature 12: note = DNA
  misc_feature 13..23: note = RNA
tcatcatttgtattctgcatggt

SEQ ID NO: 1034 - DNA, 23 bp, synthetic construct
  source 1..23: mol_type = other DNA
  modified_base 1: mod_base = OTHER; note = Vinyl-phosphonate-2'-O-methyluridine-3'-phosphate
  modified_base 2: mod_base = OTHER; note = 2'-fluoroadenosine-3'-phosphate
  modified_base 3: mod_base = OTHER; note = 2'-O-methylcytidine-3'-phosphate
  modified_base 4: mod_base = OTHER; note = 2'-O-methyladenosine-3'-phosphate
  modified_base 6: mod_base = OTHER; note = 2'-O-methylcytidine-3'-phosphate
  modified_base 7: mod_base = OTHER; note = Adenosine-glycol nucleic acid (GNA)
  modified_base 8: mod_base = OTHER; note = 2'-O-methyluridine-3'-phosphate
  modified_base 9: mod_base = OTHER; note = 2'-O-methyluridine-3'-phosphate
  modified_base 10: mod_base = OTHER; note = 2'-O-methyluridine-3'-phosphate
  modified_base 11: mod_base = OTHER; note = 2'-O-methylguanosine-3'-phosphate
  modified_base 12: mod_base = OTHER; note = 2'-O-methyluridine-3'-phosphate
  modified_base 13: mod_base = OTHER; note = 2'-O-methyladenosine-3'-phosphate
  modified_base 14: mod_base = OTHER; note = 2'-fluorouridine-3'-phosphate
  modified_base 15: mod_base = OTHER; note = 2'-O-methyluridine-3'-phosphate
  modified_base 16: mod_base = OTHER; note = 2'-fluorocytidine-3'-phosphate
  modified_base 17: mod_base = OTHER; note = 2'-O-methyluridine-3'-phosphate
  modified_base 18: mod_base = OTHER; note = 2'-O-methylguanosine-3'-phosphate
  modified_base 19: mod_base = OTHER; note = 2'-O-methylcytidine-3'-phosphate
  modified_base 20: mod_base = OTHER; note = 2'-O-methyladenosine-3'-phosphate
  modified_base 21: mod_base = OTHER; note = 2'-O-methyluridine-3'-phosphorothioate
  modified_base 22: mod_base = OTHER; note = 2'-O-methylguanosine-3'-phosphorothioate
  modified_base 23: mod_base = OTHER; note = 2'-O-methylguanosine-3'-phosphate
  misc_feature 1..4: note = RNA
  misc_feature 5: note = DNA
  misc_feature 6..23: note = RNA
tacatcatttgtattctgcatgg

SEQ ID NO: 1035 - DNA, 23 bp, synthetic construct
  source 1..23: mol_type = other DNA
  modified_base 1: mod_base = OTHER; note = Vinyl-phosphonate-2'-O-methyluridine-3'-phosphate
  modified_base 3: mod_base = OTHER; note = 2'-O-methyluridine-3'-phosphate
  modified_base 4: mod_base = OTHER; note = 2'-O-methyladenosine-3'-phosphate
  modified_base 6: mod_base = OTHER; note = 2'-O-methyladenosine-3'-phosphate
  modified_base 8: mod_base = OTHER; note = 2'-O-methylcytidine-3'-phosphate
  modified_base 9: mod_base = OTHER; note = 2'-O-methyladenosine-3'-phosphate
  modified_base 10: mod_base = OTHER; note = 2'-O-methyluridine-3'-phosphate
  modified_base 11: mod_base = OTHER; note = 2'-O-methyluridine-3'-phosphate
  modified_base 13: mod_base = OTHER; note = 2'-O-methylguanosine-3'-phosphate
  modified_base 14: mod_base = OTHER; note = 2'-fluorouridine-3'-phosphate
  modified_base 15: mod_base = OTHER; note = 2'-O-methyladenosine-3'-phosphate
  modified_base 16: mod_base = OTHER; note = 2'-O-methyluridine-3'-phosphate
  modified_base 17: mod_base = OTHER; note = 2'-O-methyluridine-3'-phosphate
  modified_base 18: mod_base = OTHER; note = 2'-O-methylcytidine-3'-phosphate
  modified_base 19: mod_base = OTHER; note = 2'-O-methyluridine-3'-phosphate
  modified_base 20: mod_base = OTHER; note = 2'-O-methylguanosine-3'-phosphate
  modified_base 21: mod_base = OTHER; note = 2'-O-methylcytidine-3'-phosphorothioate
  modified_base 22: mod_base = OTHER; note = 2'-O-methyladenosine-3'-phosphorothioate
  modified_base 23: mod_base = OTHER; note = 2'-O-methyluridine-3'-phosphate
  misc_feature 1: note = RNA
  misc_feature 2: note = DNA
  misc_feature 3..4: note = RNA
  misc_feature 5: note = DNA
  misc_feature 6: note = RNA
  misc_feature 7: note = DNA
  misc_feature 8..11: note = RNA
  misc_feature 12: note = DNA
  misc_feature 13..23: note = RNA
tctacatcatttgtattctgcat

SEQ ID NO: 1036 - DNA, 23 bp, synthetic construct
  source 1..23: mol_type = other DNA
  modified_base 1: mod_base = OTHER; note = Vinyl-phosphonate-2'-O-methyluridine-3'-phosphate
  modified_base 2: mod_base = OTHER; note = 2'-fluorouridine-3'-phosphate
  modified_base 3: mod_base = OTHER; note = 2'-O-methylcytidine-3'-phosphate
  modified_base 4: mod_base = OTHER; note = 2'-O-methyluridine-3'-phosphate
  modified_base 6: mod_base = OTHER; note = 2'-O-methylcytidine-3'-phosphate
  modified_base 7: mod_base = OTHER; note = Adenosine-glycol nucleic acid (GNA)
  modified_base 8: mod_base = OTHER; note = 2'-O-methyluridine-3'-phosphate
  modified_base 9: mod_base = OTHER; note = 2'-O-methylcytidine-3'-phosphate
  modified_base 10: mod_base = OTHER; note = 2'-O-methyladenosine-3'-phosphate
  modified_base 11: mod_base = OTHER; note = 2'-O-methyluridine-3'-phosphate
  modified_base 12: mod_base = OTHER; note = 2'-O-methyluridine-3'-phosphate
  modified_base 13: mod_base = OTHER; note = 2'-O-methyluridine-3'-phosphate
  modified_base 14: mod_base = OTHER; note = 2'-fluoroguanosine-3'-phosphate
  modified_base 15: mod_base = OTHER; note = 2'-O-methyluridine-3'-phosphate
  modified_base 16: mod_base = OTHER; note = 2'-fluoroadenosine-3'-phosphate
  modified_base 17: mod_base = OTHER; note = 2'-O-methyluridine-3'-phosphate
  modified_base 18: mod_base = OTHER; note = 2'-O-methyluridine-3'-phosphate
  modified_base 19: mod_base = OTHER; note = 2'-O-methylcytidine-3'-phosphate
  modified_base 20: mod_base = OTHER; note = 2'-O-methyluridine-3'-phosphate
  modified_base 21: mod_base = OTHER; note = 2'-O-methylguanosine-3'-phosphorothioate
  modified_base 22: mod_base = OTHER; note = 2'-O-methylcytidine-3'-phosphorothioate
  modified_base 23: mod_base = OTHER; note = 2'-O-methyladenosine-3'-phosphate
  misc_feature 1..4: note = RNA
  misc_feature 5: note = DNA
  misc_feature 6..23: note = RNA
ttctacatcatttgtattctgca

SEQ ID NO: 1037 - DNA, 23 bp, synthetic construct
  source 1..23: mol_type = other DNA
  modified_base 1: mod_base = OTHER; note = Vinyl-phosphonate-2'-O-methyluridine-3'-phosphate
  modified_base 3: mod_base = OTHER; note = 2'-O-methyladenosine-3'-phosphate
  modified_base 4: mod_base = OTHER; note = 2'-O-methylcytidine-3'-phosphate
  modified_base 6: mod_base = OTHER; note = 2'-O-methyladenosine-3'-phosphate
  modified_base 8: mod_base = OTHER; note = 2'-O-methylcytidine-3'-phosphate
  modified_base 9: mod_base = OTHER; note = 2'-O-methyluridine-3'-phosphate
  modified_base 10: mod_base = OTHER; note = 2'-O-methylguanosine-3'-phosphate
  modified_base 11: mod_base = OTHER; note = 2'-O-methyluridine-3'-phosphate
  modified_base 13: mod_base = OTHER; note = 2'-O-methyluridine-3'-phosphate
  modified_base 14: mod_base = OTHER; note = 2'-fluorocytidine-3'-phosphate
  modified_base 15: mod_base = OTHER; note = 2'-O-methyluridine-3'-phosphate
  modified_base 16: mod_base = OTHER; note = 2'-O-methyladenosine-3'-phosphate
  modified_base 17: mod_base = OTHER; note = 2'-O-methylcytidine-3'-phosphate
  modified_base 18: mod_base = OTHER; note = 2'-O-methyladenosine-3'-phosphate
  modified_base 19: mod_base = OTHER; note = 2'-O-methyluridine-3'-phosphate
  modified_base 20: mod_base = OTHER; note = 2'-O-methylcytidine-3'-phosphate
  modified_base 21: mod_base = OTHER; note = 2'-O-methyladenosine-3'-phosphorothioate
  modified_base 22: mod_base = OTHER; note = 2'-O-methyluridine-3'-phosphorothioate
  modified_base 23: mod_base = OTHER; note = 2'-O-methyluridine-3'-phosphate
  misc_feature 1: note = RNA
  misc_feature 2: note = DNA
  misc_feature 3..4: note = RNA
  misc_feature 5: note = DNA
  misc_feature 6: note = RNA
  misc_feature 7: note = DNA
  misc_feature 8..11: note = RNA
  misc_feature 12: note = DNA
  misc_feature 13..23: note = RNA
taacgagctgtttctacatcatt

SEQ ID NO: 1038 - DNA, 23 bp, synthetic construct
  source 1..23: mol_type = other DNA
  modified_base 1: mod_base = OTHER; note = Vinyl-phosphonate-2'-O-methyluridine-3'-phosphate
  modified_base 3: mod_base = OTHER; note = 2'-O-methyladenosine-3'-phosphate
  modified_base 4: mod_base = OTHER; note = 2'-O-methyladenosine-3'-phosphate
  modified_base 6: mod_base = OTHER; note = 2'-O-methylguanosine-3'-phosphate
  modified_base 8: mod_base = OTHER; note = 2'-O-methylguanosine-3'-phosphate
  modified_base 9: mod_base = OTHER; note = 2'-O-methylcytidine-3'-phosphate
  modified_base 10: mod_base = OTHER; note = 2'-O-methyluridine-3'-phosphate
  modified_base 11: mod_base = OTHER; note = 2'-O-methylguanosine-3'-phosphate
  modified_base 13: mod_base = OTHER; note = 2'-O-methyluridine-3'-phosphate
  modified_base 14: mod_base = OTHER; note = 2'-fluorouridine-3'-phosphate
  modified_base 15: mod_base = OTHER; note = 2'-O-methylcytidine-3'-phosphate
  modified_base 16: mod_base = OTHER; note = 2'-O-methyluridine-3'-phosphate
  modified_base 17: mod_base = OTHER; note = 2'-O-methyladenosine-3'-phosphate
  modified_base 18: mod_base = OTHER; note = 2'-O-methylcytidine-3'-phosphate
  modified_base 19: mod_base = OTHER; note = 2'-O-methyladenosine-3'-phosphate
  modified_base 20: mod_base = OTHER; note = 2'-O-methyluridine-3'-phosphate
  modified_base 21: mod_base = OTHER; note = 2'-O-methylcytidine-3'-phosphorothioate
  modified_base 22: mod_base = OTHER; note = 2'-O-methyladenosine-3'-phosphorothioate
  modified_base 23: mod_base = OTHER; note = 2'-O-methyluridine-3'-phosphate
  misc_feature 1: note = RNA
  misc_feature 2: note = DNA
  misc_feature 3..4: note = RNA
  misc_feature 5: note = DNA
  misc_feature 6: note = RNA
  misc_feature 7: note = DNA
  misc_feature 8..11: note = RNA
  misc_feature 12: note = DNA
  misc_feature 13..23: note = RNA
tcaacgagctgtttctacatcat

SEQ ID NO: 1039 - DNA, 23 bp, synthetic construct
  source 1..23: mol_type = other DNA
  modified_base 1: mod_base = OTHER; note = Vinyl-phosphonate-2'-O-methyluridine-3'-phosphate
  modified_base 3: mod_base = OTHER; note = 2'-O-methyladenosine-3'-phosphate
  modified_base 4: mod_base = OTHER; note = 2'-O-methylguanosine-3'-phosphate
  modified_base 6: mod_base = OTHER; note = 2'-O-methylcytidine-3'-phosphate
  modified_base 8: mod_base = OTHER; note = 2'-O-methyluridine-3'-phosphate
  modified_base 9: mod_base = OTHER; note = 2'-O-methyladenosine-3'-phosphate
  modified_base 10: mod_base = OTHER; note = 2'-O-methyladenosine-3'-phosphate
  modified_base 11: mod_base = OTHER; note = 2'-O-methyladenosine-3'-phosphate
  modified_base 13: mod_base = OTHER; note = 2'-O-methyladenosine-3'-phosphate
  modified_base 14: mod_base = OTHER; note = 2'-fluorouridine-3'-phosphate
  modified_base 15: mod_base = OTHER; note = 2'-O-methylguanosine-3'-phosphate
  modified_base 16: mod_base = OTHER; note = 2'-O-methylguanosine-3'-phosphate
  modified_base 17: mod_base = OTHER; note = 2'-O-methylcytidine-3'-phosphate
  modified_base 18: mod_base = OTHER; note = 2'-O-methylcytidine-3'-phosphate
  modified_base 19: mod_base = OTHER; note = 2'-O-methyladenosine-3'-phosphate
  modified_base 20: mod_base = OTHER; note = 2'-O-methylguanosine-3'-phosphate
  modified_base 21: mod_base = OTHER; note = 2'-O-methyluridine-3'-phosphorothioate
  modified_base 22: mod_base = OTHER; note = 2'-O-methyladenosine-3'-phosphorothioate
  modified_base 23: mod_base = OTHER; note = 2'-O-methyladenosine-3'-phosphate
  misc_feature 1: note = RNA
  misc_feature 2: note = DNA
  misc_feature 3..4: note = RNA
  misc_feature 5: note = DNA
  misc_feature 6: note = RNA
  misc_feature 7: note = DNA
  misc_feature 8..11: note = RNA
  misc_feature 12: note = DNA
  misc_feature 13..23: note = RNA
tcagacttaaagatggccagtaa

SEQ ID NO: 1040 - DNA, 23 bp, synthetic construct
  source 1..23: mol_type = other DNA
  modified_base 1: mod_base = OTHER; note = Vinyl-phosphonate-2'-O-methyluridine-3'-phosphate
  modified_base 3: mod_base = OTHER; note = 2'-O-methylcytidine-3'-phosphate
  modified_base 4: mod_base = OTHER; note = 2'-O-methyladenosine-3'-phosphate
  modified_base 6: mod_base = OTHER; note = 2'-O-methyladenosine-3'-phosphate
  modified_base 8: mod_base = OTHER; note = 2'-O-methyluridine-3'-phosphate
  modified_base 9: mod_base = OTHER; note = 2'-O-methyluridine-3'-phosphate
  modified_base 10: mod_base = OTHER; note = 2'-O-methyladenosine-3'-phosphate
  modified_base 11: mod_base = OTHER; note = 2'-O-methyladenosine-3'-phosphate
  modified_base 13: mod_base = OTHER; note = 2'-O-methylguanosine-3'-phosphate
  modified_base 14: mod_base = OTHER; note = 2'-fluoroadenosine-3'-phosphate
  modified_base 15: mod_base = OTHER; note = 2'-O-methyluridine-3'-phosphate
  modified_base 16: mod_base = OTHER; note = 2'-O-methylguanosine-3'-phosphate
  modified_base 17: mod_base = OTHER; note = 2'-O-methylguanosine-3'-phosphate
  modified_base 18: mod_base = OTHER; note = 2'-O-methylcytidine-3'-phosphate
  modified_base 19: mod_base = OTHER; note = 2'-O-methylcytidine-3'-phosphate
  modified_base 20: mod_base = OTHER; note = 2'-O-methyladenosine-3'-phosphate
  modified_base 21: mod_base = OTHER; note = 2'-O-methylguanosine-3'-phosphorothioate
  modified_base 22: mod_base = OTHER; note = 2'-O-methyluridine-3'-phosphorothioate
  modified_base 23: mod_base = OTHER; note = 2'-O-methyladenosine-3'-phosphate
  misc_feature 1: note = RNA
  misc_feature 2: note = DNA
  misc_feature 3..4: note = RNA
  misc_feature 5: note = DNA
  misc_feature 6: note = RNA
  misc_feature 7: note = DNA
  misc_feature 8..11: note = RNA
  misc_feature 12: note = DNA
  misc_feature 13..23: note = RNA
tccagacttaaagatggccagta

SEQ ID NO: 1041 - DNA, 23 bp, synthetic construct
  source 1..23: mol_type = other DNA
  modified_base 1: mod_base = OTHER; note = Vinyl-phosphonate-2'-O-methyluridine-3'-phosphate
  modified_base 2: mod_base = OTHER; note = 2'-fluorouridine-3'-phosphate
  modified_base 3: mod_base = OTHER; note = 2'-O-methylcytidine-3'-phosphate
  modified_base 4: mod_base = OTHER; note = 2'-O-methylcytidine-3'-phosphate
  modified_base 6: mod_base = OTHER; note = 2'-O-methylguanosine-3'-phosphate
  modified_base 7: mod_base = OTHER; note = Adenosine-glycol nucleic acid (GNA)
  modified_base 8: mod_base = OTHER; note = 2'-O-methylcytidine-3'-phosphate
  modified_base 9: mod_base = OTHER; note = 2'-O-methyluridine-3'-phosphate
  modified_base 10: mod_base = OTHER; note = 2'-O-methyluridine-3'-phosphate
  modified_base 11: mod_base = OTHER; note = 2'-O-methyladenosine-3'-phosphate
  modified_base 12: mod_base = OTHER; note = 2'-O-methyladenosine-3'-phosphate
  modified_base 13: mod_base = OTHER; note = 2'-O-methyladenosine-3'-phosphate
  modified_base 14: mod_base = OTHER; note = 2'-fluoroguanosine-3'-phosphate
  modified_base 15: mod_base = OTHER; note = 2'-O-methyladenosine-3'-phosphate
  modified_base 16: mod_base = OTHER; note = 2'-fluorouridine-3'-phosphate
  modified_base 17: mod_base = OTHER; note = 2'-O-methylguanosine-3'-phosphate
  modified_base 18: mod_base = OTHER; note = 2'-O-methylguanosine-3'-phosphate
  modified_base 19: mod_base = OTHER; note = 2'-O-methylcytidine-3'-phosphate
  modified_base 20: mod_base = OTHER; note = 2'-O-methylcytidine-3'-phosphate
  modified_base 21: mod_base = OTHER; note = 2'-O-methyladenosine-3'-phosphorothioate
  modified_base 22: mod_base = OTHER; note = 2'-O-methylguanosine-3'-phosphorothioate
  modified_base 23: mod_base = OTHER; note = 2'-O-methyluridine-3'-phosphate
  misc_feature 1..4: note = RNA
  misc_feature 5: note = DNA
  misc_feature 6..23: note = RNA
ttccagacttaaagatggccagt

SEQ ID NO: 1042 - DNA, 23 bp, synthetic construct
  source 1..23: mol_type = other DNA
  modified_base 1: mod_base = OTHER; note = Vinyl-phosphonate-2'-O-methyluridine-3'-phosphate
  modified_base 3: mod_base = OTHER; note = 2'-O-methyluridine-3'-phosphate
  modified_base 4: mod_base = OTHER; note = 2'-O-methylcytidine-3'-phosphate
  modified_base 6: mod_base = OTHER; note = 2'-O-methyladenosine-3'-phosphate
  modified_base 8: mod_base = OTHER; note = 2'-O-methyladenosine-3'-phosphate
  modified_base 9: mod_base = OTHER; note = 2'-O-methylcytidine-3'-phosphate
  modified_base 10: mod_base = OTHER; note = 2'-O-methyluridine-3'-phosphate
  modified_base 11: mod_base = OTHER; note = 2'-O-methyluridine-3'-phosphate
  modified_base 13: mod_base = OTHER; note = 2'-O-methyladenosine-3'-phosphate
  modified_base 14: mod_base = OTHER; note = 2'-fluoroadenosine-3'-phosphate
  modified_base 15: mod_base = OTHER; note = 2'-O-methylguanosine-3'-phosphate
  modified_base 16: mod_base = OTHER; note = 2'-O-methyladenosine-3'-phosphate
  modified_base 17: mod_base = OTHER; note = 2'-O-methyluridine-3'-phosphate
  modified_base 18: mod_base = OTHER; note = 2'-O-methylguanosine-3'-phosphate
  modified_base 19: mod_base = OTHER; note = 2'-O-methylguanosine-3'-phosphate
  modified_base 20: mod_base = OTHER; note = 2'-O-methylcytidine-3'-phosphate
  modified_base 21: mod_base = OTHER; note = 2'-O-methylcytidine-3'-phosphorothioate
  modified_base 22: mod_base = OTHER; note = 2'-O-methyladenosine-3'-phosphorothioate
  modified_base 23: mod_base = OTHER; note = 2'-O-methylguanosine-3'-phosphate
  misc_feature 1: note = RNA
  misc_feature 2: note = DNA
  misc_feature 3..4: note = RNA
  misc_feature 5: note = DNA
  misc_feature 6: note = RNA
  misc_feature 7: note = DNA
  misc_feature 8..11: note = RNA
  misc_feature 12: note = DNA
  misc_feature 13..23: note = RNA
tctccagacttaaagatggccag

SEQ ID NO: 1043 - DNA, 23 bp, synthetic construct
  source 1..23: mol_type = other DNA
  modified_base 1: mod_base = OTHER; note = Vinyl-phosphonate-2'-O-methyluridine-3'-phosphate
  modified_base 3: mod_base = OTHER; note = 2'-O-methylcytidine-3'-phosphate
  modified_base 4: mod_base = OTHER; note = 2'-O-methyluridine-3'-phosphate
  modified_base 6: mod_base = OTHER; note = 2'-O-methylcytidine-3'-phosphate
  modified_base 8: mod_base = OTHER; note = 2'-O-methylguanosine-3'-phosphate
  modified_base 9: mod_base = OTHER; note = 2'-O-methyladenosine-3'-phosphate
  modified_base 10: mod_base = OTHER; note = 2'-O-methylcytidine-3'-phosphate
  modified_base 11: mod_base = OTHER; note = 2'-O-methyluridine-3'-phosphate
  modified_base 13: mod_base = OTHER; note = 2'-O-methyladenosine-3'-phosphate
  modified_base 14: mod_base = OTHER; note = 2'-fluoroadenosine-3'-phosphate
  modified_base 15: mod_base = OTHER; note = 2'-O-methyladenosine-3'-phosphate
  modified_base 16: mod_base = OTHER; note = 2'-O-methylguanosine-3'-phosphate
  modified_base 17: mod_base = OTHER; note = 2'-O-methyladenosine-3'-phosphate
  modified_base 18: mod_base = OTHER; note = 2'-O-methyluridine-3'-phosphate
  modified_base 19: mod_base = OTHER; note = 2'-O-methylguanosine-3'-phosphate
  modified_base 20: mod_base = OTHER; note = 2'-O-methylguanosine-3'-phosphate
  modified_base 21: mod_base = OTHER; note = 2'-O-methylcytidine-3'-phosphorothioate
  modified_base 22: mod_base = OTHER; note = 2'-O-methylcytidine-3'-phosphorothioate
  modified_base 23: mod_base = OTHER; note = 2'-O-methyladenosine-3'-phosphate
  misc_feature 1: note = RNA
  misc_feature 2: note = DNA
  misc_feature 3..4: note = RNA
  misc_feature 5: note = DNA
  misc_feature 6: note = RNA
  misc_feature 7: note = DNA
  misc_feature 8..11: note = RNA
  misc_feature 12: note = DNA
  misc_feature 13..23: note = RNA
tcctccagacttaaagatggcca

SEQ ID NO: 1044 - DNA, 23 bp, synthetic construct
  source 1..23: mol_type = other DNA
  modified_base 1: mod_base = OTHER; note = Vinyl-phosphonate-2'-O-methyluridine-3'-phosphate
  modified_base 3: mod_base = OTHER; note = 2'-O-methyladenosine-3'-phosphate
  modified_base 4: mod_base = OTHER; note = 2'-O-methylguanosine-3'-phosphate
  modified_base 6: mod_base = OTHER; note = 2'-O-methyladenosine-3'-phosphate
  modified_base 8: mod_base = OTHER; note = 2'-O-methylcytidine-3'-phosphate
  modified_base 9: mod_base = OTHER; note = 2'-O-methylcytidine-3'-phosphate
  modified_base 10: mod_base = OTHER; note = 2'-O-methyladenosine-3'-phosphate
  modified_base 11: mod_base = OTHER; note = 2'-O-methylcytidine-3'-phosphate
  modified_base 13: mod_base = OTHER; note = 2'-O-methylguanosine-3'-phosphate
  modified_base 14: mod_base = OTHER; note = 2'-fluoroguanosine-3'-phosphate
  modified_base 15: mod_base = OTHER; note = 2'-O-methyluridine-3'-phosphate
  modified_base 16: mod_base = OTHER; note = 2'-O-methylguanosine-3'-phosphate
  modified_base 17: mod_base = OTHER; note = 2'-O-methyladenosine-3'-phosphate
  modified_base 18: mod_base = OTHER; note = 2'-O-methyladenosine-3'-phosphate
  modified_base 19: mod_base = OTHER; note = 2'-O-methylcytidine-3'-phosphate
  modified_base 20: mod_base = OTHER; note = 2'-O-methylcytidine-3'-phosphate
  modified_base 21: mod_base = OTHER; note = 2'-O-methyladenosine-3'-phosphorothioate
  modified_base 22: mod_base = OTHER; note = 2'-O-methyladenosine-3'-phosphorothioate
  modified_base 23: mod_base = OTHER; note = 2'-O-methylguanosine-3'-phosphate
  misc_feature 1: note = RNA
  misc_feature 2: note = DNA
  misc_feature 3..4: note = RNA
  misc_feature 5: note = DNA
  misc_feature 6: note = RNA
  misc_feature 7: note = DNA
  misc_feature 8..11: note = RNA
  misc_feature 12: note = DNA
  misc_feature 13..23: note = RNA
tcagaatccactggtgaaccaag

SEQ ID NO: 1045 - DNA, 23 bp, synthetic construct
  source 1..23: mol_type = other DNA
  modified_base 1: mod_base = OTHER; note = Vinyl-phosphonate-2'-O-methyluridine-3'-phosphate
  modified_base 3: mod_base = OTHER; note = 2'-O-methylcytidine-3'-phosphate
  modified_base 4: mod_base = OTHER; note = 2'-O-methyladenosine-3'-phosphate
  modified_base 6: mod_base = OTHER; note = 2'-O-methylcytidine-3'-phosphate
  modified_base 8: mod_base = OTHER; note = 2'-O-methylcytidine-3'-phosphate
  modified_base 9: mod_base = OTHER; note = 2'-O-methyladenosine-3'-phosphate
  modified_base 10: mod_base = OTHER; note = 2'-O-methylguanosine-3'-phosphate
  modified_base 11: mod_base = OTHER; note = 2'-O-methyladenosine-3'-phosphate
  modified_base 13: mod_base = OTHER; note = 2'-O-methyluridine-3'-phosphate
  modified_base 14: mod_base = OTHER; note = 2'-fluorocytidine-3'-phosphate
  modified_base 15: mod_base = OTHER; note = 2'-O-methylcytidine-3'-phosphate
  modified_base 16: mod_base = OTHER; note = 2'-O-methyladenosine-3'-phosphate
  modified_base 17: mod_base = OTHER; note = 2'-O-methylcytidine-3'-phosphate
  modified_base 18: mod_base = OTHER; note = 2'-O-methyluridine-3'-phosphate
  modified_base 19: mod_base = OTHER; note = 2'-O-methylguanosine-3'-phosphate
  modified_base 20: mod_base = OTHER; note = 2'-O-methylguanosine-3'-phosphate
  modified_base 21: mod_base = OTHER; note = 2'-O-methyluridine-3'-phosphorothioate
  modified_base 22: mod_base = OTHER; note = 2'-O-methylguanosine-3'-phosphorothioate
  modified_base 23: mod_base = OTHER; note = 2'-O-methyladenosine-3'-phosphate
  misc_feature 1: note = RNA
  misc_feature 2: note = DNA
  misc_feature 3..4: note = RNA
  misc_feature 5: note = DNA
  misc_feature 6: note = RNA
  misc_feature 7: note = DNA
  misc_feature 8..11: note = RNA
  misc_feature 12: note = DNA
  misc_feature 13..23: note = RNA
tacaacacagaatccactggtga

SEQ ID NO: 1046 - DNA, 23 bp, synthetic construct
  source 1..23: mol_type = other DNA
  modified_base 1: mod_base = OTHER; note = Vinyl-phosphonate-2'-O-methyluridine-3'-phosphate
  modified_base 2: mod_base = OTHER; note = 2'-fluorocytidine-3'-phosphate
  modified_base 3: mod_base = OTHER; note = 2'-O-methylcytidine-3'-phosphate
  modified_base 4: mod_base = OTHER; note = 2'-O-methyladenosine-3'-phosphate
  modified_base 6: mod_base = OTHER; note = 2'-O-methylcytidine-3'-phosphate
  modified_base 7: mod_base = OTHER; note = Thymidine-glycol nucleic acid (GNA) S-Isomer
  modified_base 8: mod_base = OTHER; note = 2'-O-methyladenosine-3'-phosphate
  modified_base 9: mod_base = OTHER; note = 2'-O-methyladenosine-3'-phosphate
  modified_base 10: mod_base = OTHER; note = 2'-O-methyladenosine-3'-phosphate
  modified_base 11: mod_base = OTHER; note = 2'-O-methylcytidine-3'-phosphate
  modified_base 12: mod_base = OTHER; note = 2'-O-methylguanosine-3'-phosphate
  modified_base 13: mod_base = OTHER; note = 2'-O-methylcytidine-3'-phosphate
  modified_base 14: mod_base = OTHER; note = 2'-fluoroadenosine-3'-phosphate
  modified_base 15: mod_base = OTHER; note = 2'-O-methylcytidine-3'-phosphate
  modified_base 16: mod_base = OTHER; note = 2'-fluorouridine-3'-phosphate
  modified_base 17: mod_base = OTHER; note = 2'-O-methylguanosine-3'-phosphate
  modified_base 18: mod_base = OTHER; note = 2'-O-methylcytidine-3'-phosphate
  modified_base 19: mod_base = OTHER; note = 2'-O-methylcytidine-3'-phosphate
  modified_base 20: mod_base = OTHER; note = 2'-O-methyladenosine-3'-phosphate
  modified_base 21: mod_base = OTHER; note = 2'-O-methyluridine-3'-phosphorothioate
  modified_base 22: mod_base = OTHER; note = 2'-O-methyluridine-3'-phosphorothioate
  modified_base 23: mod_base = OTHER; note = 2'-O-methyluridine-3'-phosphate
  misc_feature 1..4: note = RNA
  misc_feature 5: note = DNA
  misc_feature 6: note = RNA
  misc_feature 7: note = DNA
  misc_feature 8..23: note = RNA
tccagctaaacgcactgccattt

SEQ ID NO: 1047 - DNA, 23 bp, synthetic construct
  source 1..23: mol_type = other DNA
  modified_base 1: mod_base = OTHER; note = Vinyl-phosphonate-2'-O-methyluridine-3'-phosphate
  modified_base 3: mod_base = OTHER; note = 2'-O-methylcytidine-3'-phosphate
  modified_base 4: mod_base = OTHER; note = 2'-O-methyladenosine-3'-phosphate
  modified_base 6: mod_base = OTHER; note = 2'-O-methylcytidine-3'-phosphate
  modified_base 8: mod_base = OTHER; note = 2'-O-methyladenosine-3'-phosphate
  modified_base 9: mod_base = OTHER; note = 2'-O-methyladenosine-3'-phosphate
  modified_base 10: mod_base = OTHER; note = 2'-O-methyladenosine-3'-phosphate
  modified_base 11: mod_base = OTHER; note = 2'-O-methylcytidine-3'-phosphate
  modified_base 13: mod_base = OTHER; note = 2'-O-methylcytidine-3'-phosphate
  modified_base 14: mod_base = OTHER; note = 2'-fluoroadenosine-3'-phosphate
  modified_base 15: mod_base = OTHER; note = 2'-O-methylcytidine-3'-phosphate
  modified_base 16: mod_base = OTHER; note = 2'-O-methyluridine-3'-phosphate
  modified_base 17: mod_base = OTHER; note = 2'-O-methylguanosine-3'-phosphate
  modified_base 18: mod_base = OTHER; note = 2'-O-methylcytidine-3'-phosphate
  modified_base 19: mod_base = OTHER; note = 2'-O-methylcytidine-3'-phosphate
  modified_base 20: mod_base = OTHER; note = 2'-O-methyladenosine-3'-phosphate
  modified_base 21: mod_base = OTHER; note = 2'-O-methyluridine-3'-phosphorothioate
  modified_base 22: mod_base = OTHER; note = 2'-O-methyluridine-3'-phosphorothioate
  modified_base 23: mod_base = OTHER; note = 2'-O-methyluridine-3'-phosphate
  misc_feature 1: note = RNA
  misc_feature 2: note = DNA
  misc_feature 3..4: note = RNA
  misc_feature 5: note = DNA
  misc_feature 6: note = RNA
  misc_feature 7: note = DNA
  misc_feature 8..11: note = RNA
  misc_feature 12: note = DNA
  misc_feature 13..23: note = RNA
tccagctaaacgcactgccattt

SEQ ID NO: 1048 - DNA, 23 bp, synthetic construct
  source 1..23: mol_type = other DNA
  modified_base 1: mod_base = OTHER; note = Vinyl-phosphonate-2'-O-methyluridine-3'-phosphate
  modified_base 2: mod_base = OTHER; note = 2'-fluorouridine-3'-phosphate
  modified_base 3: mod_base = OTHER; note = 2'-O-methylguanosine-3'-phosphate
  modified_base 4: mod_base = OTHER; note = 2'-O-methyluridine-3'-phosphate
  modified_base 6: mod_base = OTHER; note = 2'-O-methyluridine-3'-phosphate
  modified_base 7: mod_base = OTHER; note = Thymidine-glycol nucleic acid (GNA) S-Isomer
  modified_base 8: mod_base = OTHER; note = 2'-O-methylguanosine-3'-phosphate
  modified_base 9: mod_base = OTHER; note = 2'-O-methyluridine-3'-phosphate
  modified_base 10: mod_base = OTHER; note = 2'-O-methyluridine-3'-phosphate
  modified_base 11: mod_base = OTHER; note = 2'-O-methylguanosine-3'-phosphate
  modified_base 12: mod_base = OTHER; note = 2'-O-methyladenosine-3'-phosphate
  modified_base 13: mod_base = OTHER; note = 2'-O-methylguanosine-3'-phosphate
  modified_base 14: mod_base = OTHER; note = 2'-fluorocytidine-3'-phosphate
  modified_base 15: mod_base = OTHER; note = 2'-O-methyladenosine-3'-phosphate
  modified_base 16: mod_base = OTHER; note = 2'-fluoroadenosine-3'-phosphate
  modified_base 17: mod_base = OTHER; note = 2'-O-methylguanosine-3'-phosphate
  modified_base 18: mod_base = OTHER; note = 2'-O-methylguanosine-3'-phosphate
  modified_base 19: mod_base = OTHER; note = 2'-O-methylcytidine-3'-phosphate
  modified_base 20: mod_base = OTHER; note = 2'-O-methyladenosine-3'-phosphate
  modified_base 21: mod_base = OTHER; note = 2'-O-methyladenosine-3'-phosphorothioate
  modified_base 22: mod_base = OTHER; note = 2'-O-methylcytidine-3'-phosphorothioate
  modified_base 23: mod_base = OTHER; note = 2'-O-methylcytidine-3'-phosphate
  misc_feature 1..4: note = RNA
  misc_feature 5: note = DNA
  misc_feature 6: note = RNA
  misc_feature 7: note = DNA
  misc_feature 8..23: note = RNA
ttgttttgttgagcaaggcaacc

SEQ ID NO: 1049 - DNA, 23 bp, synthetic construct
  source 1..23: mol_type = other DNA
  modified_base 1: mod_base = OTHER; note = Vinyl-phosphonate-2'-O-methyluridine-3'-phosphate
  modified_base 3: mod_base = OTHER; note = 2'-O-methyluridine-3'-phosphate
  modified_base 4: mod_base = OTHER; note = 2'-O-methylguanosine-3'-phosphate
  modified_base 6: mod_base = OTHER; note = 2'-O-methyluridine-3'-phosphate
  modified_base 8: mod_base = OTHER; note = 2'-O-methyluridine-3'-phosphate
  modified_base 9: mod_base = OTHER; note = 2'-O-methylguanosine-3'-phosphate
  modified_base 10: mod_base = OTHER; note = 2'-O-methyluridine-3'-phosphate
  modified_base 11: mod_base = OTHER; note = 2'-O-methyluridine-3'-phosphate
  modified_base 13: mod_base = OTHER; note = 2'-O-methyladenosine-3'-phosphate
  modified_base 14: mod_base = OTHER; note = 2'-fluoroguanosine-3'-phosphate
  modified_base 15: mod_base = OTHER; note = 2'-O-methylcytidine-3'-phosphate
  modified_base 16: mod_base = OTHER; note = 2'-O-methyladenosine-3'-phosphate
  modified_base 17: mod_base = OTHER; note = 2'-O-methyladenosine-3'-phosphate
  modified_base 18: mod_base = OTHER; note = 2'-O-methylguanosine-3'-phosphate
  modified_base 19: mod_base = OTHER; note = 2'-O-methylguanosine-3'-phosphate
  modified_base 20: mod_base = OTHER; note = 2'-O-methylcytidine-3'-phosphate
  modified_base 21: mod_base = OTHER; note = 2'-O-methyladenosine-3'-phosphorothioate
  modified_base 22: mod_base = OTHER; note = 2'-O-methyladenosine-3'-phosphorothioate
  modified_base 23: mod_base = OTHER; note = 2'-O-methylcytidine-3'-phosphate
  misc_feature 1: note = RNA
  misc_feature 2: note = DNA
  misc_feature 3..4: note = RNA
  misc_feature 5: note = DNA
  misc_feature 6: note = RNA
  misc_feature 7: note = DNA
  misc_feature 8..11: note = RNA
  misc_feature 12: note = DNA
  misc_feature 13..23: note = RNA
tttgttttgttgagcaaggcaac

SEQ ID NO: 1050 - DNA, 23 bp, synthetic construct
  source 1..23: mol_type = other DNA
  modified_base 1: mod_base = OTHER; note = Vinyl-phosphonate-2'-O-methyluridine-3'-phosphate
  modified_base 2: mod_base = OTHER; note = 2'-fluorouridine-3'-phosphate
  modified_base 3: mod_base = OTHER; note = 2'-O-methyluridine-3'-phosphate
  modified_base 4: mod_base = OTHER; note = 2'-O-methylguanosine-3'-phosphate
  modified_base 6: mod_base = OTHER; note = 2'-O-methyluridine-3'-phosphate
  modified_base 7: mod_base = OTHER; note = Thymidine-glycol nucleic acid (GNA) S-Isomer
  modified_base 8: mod_base = OTHER; note = 2'-O-methyluridine-3'-phosphate
  modified_base 9: mod_base = OTHER; note = 2'-O-methylguanosine-3'-phosphate
  modified_base 10: mod_base = OTHER; note = 2'-O-methyluridine-3'-phosphate
  modified_base 11: mod_base = OTHER; note = 2'-O-methyluridine-3'-phosphate
  modified_base 12: mod_base = OTHER; note = 2'-O-methylguanosine-3'-phosphate
  modified_base 13: mod_base = OTHER; note = 2'-O-methyladenosine-3'-phosphate
  modified_base 14: mod_base = OTHER; note = 2'-fluoroguanosine-3'-phosphate
  modified_base 15: mod_base = OTHER; note = 2'-O-methylcytidine-3'-phosphate
  modified_base 16: mod_base = OTHER; note = 2'-fluoroadenosine-3'-phosphate
  modified_base 17: mod_base = OTHER; note = 2'-O-methyladenosine-3'-phosphate
  modified_base 18: mod_base = OTHER; note = 2'-O-methylguanosine-3'-phosphate
  modified_base 19: mod_base = OTHER; note = 2'-O-methylguanosine-3'-phosphate
  modified_base 20: mod_base = OTHER; note = 2'-O-methylcytidine-3'-phosphate
  modified_base 21: mod_base = OTHER; note = 2'-O-methyladenosine-3'-phosphorothioate
  modified_base 22: mod_base = OTHER; note = 2'-O-methyladenosine-3'-phosphorothioate
  modified_base 23: mod_base = OTHER; note = 2'-O-methylcytidine-3'-phosphate
  misc_feature 1..4: note = RNA
  misc_feature 5: note = DNA
  misc_feature 6: note = RNA
  misc_feature 7: note = DNA
  misc_feature 8..23: note = RNA
tttgttttgttgagcaaggcaac

SEQ ID NO: 1051 - DNA, 23 bp, synthetic construct
  source 1..23: mol_type = other DNA
  modified_base 1: mod_base = OTHER; note = Vinyl-phosphonate-2'-O-methyluridine-3'-phosphate
  modified_base 2: mod_base = OTHER; note = 2'-fluorouridine-3'-phosphate
  modified_base 3: mod_base = OTHER; note = 2'-O-methyluridine-3'-phosphate
  modified_base 4: mod_base = OTHER; note = 2'-O-methyluridine-3'-phosphate
  modified_base 6: mod_base = OTHER; note = 2'-O-methyluridine-3'-phosphate
  modified_base 7: mod_base = OTHER; note = Thymidine-glycol nucleic acid (GNA) S-Isomer
  modified_base 8: mod_base = OTHER; note = 2'-O-methyluridine-3'-phosphate
  modified_base 9: mod_base = OTHER; note = 2'-O-methyluridine-3'-phosphate
  modified_base 10: mod_base = OTHER; note = 2'-O-methylguanosine-3'-phosphate
  modified_base 11: mod_base = OTHER; note = 2'-O-methyluridine-3'-phosphate
  modified_base 12: mod_base = OTHER; note = 2'-O-methyluridine-3'-phosphate
  modified_base 13: mod_base = OTHER; note = 2'-O-methylguanosine-3'-phosphate
  modified_base 14: mod_base = OTHER; note = 2'-fluoroadenosine-3'-phosphate
  modified_base 15: mod_base = OTHER; note = 2'-O-methylguanosine-3'-phosphate
  modified_base 16: mod_base = OTHER; note = 2'-fluorocytidine-3'-phosphate
  modified_base 17: mod_base = OTHER; note = 2'-O-methyladenosine-3'-phosphate
  modified_base 18: mod_base = OTHER; note = 2'-O-methyladenosine-3'-phosphate
  modified_base 19: mod_base = OTHER; note = 2'-O-methylguanosine-3'-phosphate
  modified_base 20: mod_base = OTHER; note = 2'-O-methylguanosine-3'-phosphate
  modified_base 21: mod_base = OTHER; note = 2'-O-methylcytidine-3'-phosphorothioate
  modified_base 22: mod_base = OTHER; note = 2'-O-methyladenosine-3'-phosphorothioate
  modified_base 23: mod_base = OTHER; note = 2'-O-methyladenosine-3'-phosphate
  misc_feature 1..4: note = RNA
  misc_feature 5: note = DNA
  misc_feature 6: note = RNA
  misc_feature 7: note = DNA
  misc_feature 8..23: note = RNA
ttttgttttgttgagcaaggcaa

SEQ ID NO: 1052 - DNA, 23 bp, synthetic construct
  source 1..23: mol_type = other DNA
  modified_base 1: mod_base = OTHER; note = Vinyl-phosphonate-2'-O-methyluridine-3'-phosphate
  modified_base 3: mod_base = OTHER; note = 2'-O-methylguanosine-3'-phosphate
  modified_base 4: mod_base = OTHER; note = 2'-O-methyluridine-3'-phosphate
  modified_base 6: mod_base = OTHER; note = 2'-O-methyladenosine-3'-phosphate
  modified_base 8: mod_base = OTHER; note = 2'-O-methyladenosine-3'-phosphate
  modified_base 9: mod_base = OTHER; note = 2'-O-methylguanosine-3'-phosphate
  modified_base 10: mod_base = OTHER; note = 2'-O-methylcytidine-3'-phosphate
  modified_base 11: mod_base = OTHER; note = 2'-O-methylcytidine-3'-phosphate
  modified_base 13: mod_base = OTHER; note = 2'-O-methyladenosine-3'-phosphate
  modified_base 14: mod_base = OTHER; note = 2'-fluoroguanosine-3'-phosphate
  modified_base 15: mod_base = OTHER; note = 2'-O-methyladenosine-3'-phosphate
  modified_base 16: mod_base = OTHER; note = 2'-O-methyladenosine-3'-phosphate
  modified_base 17: mod_base = OTHER; note = 2'-O-methyluridine-3'-phosphate
  modified_base 18: mod_base = OTHER; note = 2'-O-methyluridine-3'-phosphate
  modified_base 19: mod_base = OTHER; note = 2'-O-methyluridine-3'-phosphate
  modified_base 20: mod_base = OTHER; note = 2'-O-methyladenosine-3'-phosphate
  modified_base 21: mod_base = OTHER; note = 2'-O-methyladenosine-3'-phosphorothioate
  modified_base 22: mod_base = OTHER; note = 2'-O-methylcytidine-3'-phosphorothioate
  modified_base 23: mod_base = OTHER; note = 2'-O-methyladenosine-3'-phosphate
  misc_feature 1: note = RNA
  misc_feature 2: note = DNA
  misc_feature 3..4: note = RNA
  misc_feature 5: note = DNA
  misc_feature 6: note = RNA
  misc_feature 7: note = DNA
  misc_feature 8..11: note = RNA
  misc_feature 12: note = DNA
  misc_feature 13..23: note = RNA
tcgtaatagccaagaatttaaca

SEQ ID NO: 1053 - DNA, 23 bp, synthetic construct
  source 1..23: mol_type = other DNA
  modified_base 1: mod_base = OTHER; note = Vinyl-phosphonate-2'-O-methyluridine-3'-phosphate
  modified_base 3: mod_base = OTHER; note = 2'-O-methyluridine-3'-phosphate
  modified_base 4: mod_base = OTHER; note = 2'-O-methylguanosine-3'-phosphate
  modified_base 6: mod_base = OTHER; note = 2'-O-methylcytidine-3'-phosphate
  modified_base 8: mod_base = OTHER; note = 2'-O-methyluridine-3'-phosphate
  modified_base 9: mod_base = OTHER; note = 2'-O-methyladenosine-3'-phosphate
  modified_base 10: mod_base = OTHER; note = 2'-O-methyladenosine-3'-phosphate
  modified_base 11: mod_base = OTHER; note = 2'-O-methyluridine-3'-phosphate
  modified_base 13: mod_base = OTHER; note = 2'-O-methylguanosine-3'-phosphate
  modified_base 14: mod_base = OTHER; note = 2'-fluorocytidine-3'-phosphate
  modified_base 15: mod_base = OTHER; note = 2'-O-methylcytidine-3'-phosphate
  modified_base 16: mod_base = OTHER; note = 2'-O-methyladenosine-3'-phosphate
  modified_base 17: mod_base = OTHER; note = 2'-O-methyladenosine-3'-phosphate
  modified_base 18: mod_base = OTHER; note = 2'-O-methylguanosine-3'-phosphate
  modified_base 19: mod_base = OTHER; note = 2'-O-methyladenosine-3'-phosphate
  modified_base 20: mod_base = OTHER; note = 2'-O-methyladenosine-3'-phosphate
  modified_base 21: mod_base = OTHER; note = 2'-O-methyluridine-3'-phosphorothioate
  modified_base 22: mod_base = OTHER; note = 2'-O-methyluridine-3'-phosphorothioate
  modified_base 23: mod_base = OTHER; note = 2'-O-methyluridine-3'-phosphate
  misc_feature 1: note = RNA
  misc_feature 2: note = DNA
  misc_feature 3..4: note = RNA
  misc_feature 5: note = DNA
  misc_feature 6: note = RNA
  misc_feature 7: note = DNA
  misc_feature 8..11: note = RNA
  misc_feature 12: note = DNA
  misc_feature 13..23: note = RNA
tctgtcgtaatagccaagaattt

SEQ ID NO: 1054 - DNA, 23 bp, synthetic construct
  source 1..23: mol_type = other DNA
  modified_base 1: mod_base = OTHER; note = Vinyl-phosphonate-2'-O-methyluridine-3'-phosphate
  modified_base 2: mod_base = OTHER; note = 2'-fluoroguanosine-3'-phosphate
  modified_base 3: mod_base = OTHER; note = 2'-O-methylguanosine-3'-phosphate
  modified_base 4: mod_base = OTHER; note = 2'-O-methylcytidine-3'-phosphate
  modified_base 6: mod_base = OTHER; note = 2'-O-methylguanosine-3'-phosphate
  modified_base 7: mod_base = OTHER; note = Thymidine-glycol nucleic acid (GNA) S-Isomer
  modified_base 8: mod_base = OTHER; note = 2'-O-methylcytidine-3'-phosphate
  modified_base 9: mod_base = OTHER; note = 2'-O-methyluridine-3'-phosphate
  modified_base 10: mod_base = OTHER; note = 2'-O-methylguanosine-3'-phosphate
  modified_base 11: mod_base = OTHER; note = 2'-O-methyluridine-3'-phosphate
  modified_base 12: mod_base = OTHER; note = 2'-O-methylcytidine-3'-phosphate
  modified_base 13: mod_base = OTHER; note = 2'-O-methylguanosine-3'-phosphate
  modified_base 14: mod_base = OTHER; note = 2'-fluorouridine-3'-phosphate
  modified_base 15: mod_base = OTHER; note = 2'-O-methyladenosine-3'-phosphate
  modified_base 16: mod_base = OTHER; note = 2'-fluoroadenosine-3'-phosphate
  modified_base 17: mod_base = OTHER; note = 2'-O-methyluridine-3'-phosphate
  modified_base 18: mod_base = OTHER; note = 2'-O-methyladenosine-3'-phosphate
  modified_base 19: mod_base = OTHER; note = 2'-O-methylguanosine-3'-phosphate
  modified_base 20: mod_base = OTHER; note = 2'-O-methylcytidine-3'-phosphate
  modified_base 21: mod_base = OTHER; note = 2'-O-methylcytidine-3'-phosphorothioate
  modified_base 22: mod_base = OTHER; note = 2'-O-methyladenosine-3'-phosphorothioate
  modified_base 23: mod_base = OTHER; note = 2'-O-methyladenosine-3'-phosphate
  misc_feature 1..4: note = RNA
  misc_feature 5: note = DNA
  misc_feature 6: note = RNA
  misc_feature 7: note = DNA
  misc_feature 8..23: note = RNA
tggcagtctgtcgtaatagccaa

SEQ ID NO: 1055 - DNA, 23 bp, synthetic construct
  source 1..23: mol_type = other DNA
  modified_base 1: mod_base = OTHER; note = Vinyl-phosphonate-2'-O-methyluridine-3'-phosphate
  modified_base 2: mod_base = OTHER; note = 2'-fluorouridine-3'-phosphate
  modified_base 3: mod_base = OTHER; note = 2'-O-methyluridine-3'-phosphate
  modified_base 4: mod_base = OTHER; note = 2'-O-methyluridine-3'-phosphate
  modified_base 6: mod_base = OTHER; note = 2'-O-methyladenosine-3'-phosphate
  modified_base 7: mod_base = OTHER; note = Adenosine-glycol nucleic acid (GNA)
  modified_base 8: mod_base = OTHER; note = 2'-O-methylguanosine-3'-phosphate
  modified_base 9: mod_base = OTHER; note = 2'-O-methylguanosine-3'-phosphate
  modified_base 10: mod_base = OTHER; note = 2'-O-methylcytidine-3'-phosphate
  modified_base 11: mod_base = OTHER; note = 2'-O-methyladenosine-3'-phosphate
  modified_base 12: mod_base = OTHER; note = 2'-O-methylguanosine-3'-phosphate
  modified_base 13: mod_base = OTHER; note = 2'-O-methyluridine-3'-phosphate
  modified_base 14: mod_base = OTHER; note = 2'-fluorocytidine-3'-phosphate
  modified_base 15: mod_base = OTHER; note = 2'-O-methyluridine-3'-phosphate
  modified_base 16: mod_base = OTHER; note = 2'-fluoroguanosine-3'-phosphate
  modified_base 17: mod_base = OTHER; note = 2'-O-methyluridine-3'-phosphate
  modified_base 18: mod_base = OTHER; note = 2'-O-methylcytidine-3'-phosphate
  modified_base 19: mod_base = OTHER; note = 2'-O-methylguanosine-3'-phosphate
  modified_base 20: mod_base = OTHER; note = 2'-O-methyluridine-3'-phosphate
  modified_base 21: mod_base = OTHER; note = 2'-O-methyladenosine-3'-phosphorothioate
  modified_base 22: mod_base = OTHER; note = 2'-O-methyladenosine-3'-phosphorothioate
  modified_base 23: mod_base = OTHER; note = 2'-O-methyluridine-3'-phosphate
  misc_feature 1..4: note = RNA
  misc_feature 5: note = DNA
  misc_feature 6..23: note = RNA
ttttgaaggcagtctgtcgtaat

SEQ ID NO: 1056 - DNA, 23 bp, synthetic construct
  source 1..23: mol_type = other DNA
  modified_base 1: mod_base = OTHER; note = Vinyl-phosphonate-2'-O-methyluridine-3'-phosphate
  modified_base 3: mod_base = OTHER; note = 2'-O-methylcytidine-3'-phosphate
  modified_base 4: mod_base = OTHER; note = 2'-O-methyluridine-3'-phosphate
  modified_base 6: mod_base = OTHER; note = 2'-O-methyladenosine-3'-phosphate
  modified_base 8: mod_base = OTHER; note = 2'-O-methyluridine-3'-phosphate
  modified_base 9: mod_base = OTHER; note = 2'-O-methyladenosine-3'-phosphate
  modified_base 10: mod_base = OTHER; note = 2'-O-methyluridine-3'-phosphate
  modified_base 11: mod_base = OTHER; note = 2'-O-methyladenosine-3'-phosphate
  modified_base 13: mod_base = OTHER; note = 2'-O-methyluridine-3'-phosphate
  modified_base 14: mod_base = OTHER; note = 2'-fluorouridine-3'-phosphate
  modified_base 15: mod_base = OTHER; note = 2'-O-methyladenosine-3'-phosphate
  modified_base 16: mod_base = OTHER; note = 2'-O-methylcytidine-3'-phosphate
  modified_base 17: mod_base = OTHER; note = 2'-O-methyluridine-3'-phosphate
  modified_base 18: mod_base = OTHER; note = 2'-O-methyladenosine-3'-phosphate
  modified_base 19: mod_base = OTHER; note = 2'-O-methyladenosine-3'-phosphate
  modified_base 20: mod_base = OTHER; note = 2'-O-methyladenosine-3'-phosphate
  modified_base 21: mod_base = OTHER; note = 2'-O-methylguanosine-3'-phosphorothioate
  modified_base 22: mod_base = OTHER; note = 2'-O-methylcytidine-3'-phosphorothioate
  modified_base 23: mod_base = OTHER; note = 2'-O-methyluridine-3'-phosphate
  misc_feature 1: note = RNA
  misc_feature 2: note = DNA
  misc_feature 3..4: note = RNA
  misc_feature 5: note = DNA
  misc_feature 6: note = RNA
  misc_feature 7: note = DNA
  misc_feature 8..11: note = RNA
  misc_feature 12: note = DNA
  misc_feature 13..23: note = RNA
tcctcattatatttactaaagct

SEQ ID NO: 1057 - DNA, 23 bp, synthetic construct
  source 1..23: mol_type = other DNA
  modified_base 1: mod_base = OTHER; note = Vinyl-phosphonate-2'-O-methyluridine-3'-phosphate
  modified_base 3: mod_base = OTHER; note = 2'-O-methyladenosine-3'-phosphate
  modified_base 4: mod_base = OTHER; note = 2'-O-methylguanosine-3'-phosphate
  modified_base 6: mod_base = OTHER; note = 2'-O-methyladenosine-3'-phosphate
  modified_base 8: mod_base = OTHER; note = 2'-O-methyladenosine-3'-phosphate
  modified_base 9: mod_base = OTHER; note = 2'-O-methylguanosine-3'-phosphate
  modified_base 10: mod_base = OTHER; note = 2'-O-methylguanosine-3'-phosphate
  modified_base 11: mod_base = OTHER; note = 2'-O-methyluridine-3'-phosphate
  modified_base 13: mod_base = OTHER; note = 2'-O-methylcytidine-3'-phosphate
  modified_base 14: mod_base = OTHER; note = 2'-fluorouridine-3'-phosphate
  modified_base 15: mod_base = OTHER; note = 2'-O-methylcytidine-3'-phosphate
  modified_base 16: mod_base = OTHER; note = 2'-O-methyladenosine-3'-phosphate
  modified_base 17: mod_base = OTHER; note = 2'-O-methyluridine-3'-phosphate
  modified_base 18: mod_base = OTHER; note = 2'-O-methyluridine-3'-phosphate
  modified_base 19: mod_base = OTHER; note = 2'-O-methyladenosine-3'-phosphate
  modified_base 20: mod_base = OTHER; note = 2'-O-methyluridine-3'-phosphate
  modified_base 21: mod_base = OTHER; note = 2'-O-methyladenosine-3'-phosphorothioate
  modified_base 22: mod_base = OTHER; note = 2'-O-methyluridine-3'-phosphorothioate
  modified_base 23: mod_base = OTHER; note = 2'-O-methyluridine-3'-phosphate
  misc_feature 1: note = RNA
  misc_feature 2: note = DNA
  misc_feature 3..4: note = RNA
  misc_feature 5: note = DNA
  misc_feature 6: note = RNA
  misc_feature 7: note = DNA
  misc_feature 8..11: note = RNA
  misc_feature 12: note = DNA
  misc_feature 13..23: note = RNA
taagtataggtcctcattatatt

SEQ ID NO: 1058 - DNA, 23 bp, synthetic construct
  source 1..23: mol_type = other DNA
  modified_base 1: mod_base = OTHER; note = Vinyl-phosphonate-2'-O-methyluridine-3'-phosphate
  modified_base 2: mod_base = OTHER; note = 2'-fluoroadenosine-3'-phosphate
  modified_base 3: mod_base = OTHER; note = 2'-O-methyladenosine-3'-phosphate
  modified_base 4: mod_base = OTHER; note = 2'-O-methylguanosine-3'-phosphate
  modified_base 6: mod_base = OTHER; note = 2'-O-methyluridine-3'-phosphate
  modified_base 7: mod_base = OTHER; note = Thymidine-glycol nucleic acid (GNA) S-Isomer
  modified_base 8: mod_base = OTHER; note = 2'-O-methylguanosine-3'-phosphate
  modified_base 9: mod_base = OTHER; note = 2'-O-methylcytidine-3'-phosphate
  modified_base 10: mod_base = OTHER; note = 2'-O-methyladenosine-3'-phosphate
  modified_base 11: mod_base = OTHER; note = 2'-O-methyluridine-3'-phosphate
  modified_base 12: mod_base = OTHER; note = 2'-O-methyluridine-3'-phosphate
  modified_base 13: mod_base = OTHER; note = 2'-O-methylcytidine-3'-phosphate
  modified_base 14: mod_base = OTHER; note = 2'-fluorocytidine-3'-phosphate
  modified_base 15: mod_base = OTHER; note = 2'-O-methyladenosine-3'-phosphate
  modified_base 16: mod_base = OTHER; note = 2'-fluorocytidine-3'-phosphate
  modified_base 17: mod_base = OTHER; note = 2'-O-methylcytidine-3'-phosphate
  modified_base 18: mod_base = OTHER; note = 2'-O-methyladenosine-3'-phosphate
  modified_base 19: mod_base = OTHER; note = 2'-O-methylguanosine-3'-phosphate
  modified_base 20: mod_base = OTHER; note = 2'-O-methylcytidine-3'-phosphate
  modified_base 21: mod_base = OTHER; note = 2'-O-methyluridine-3'-phosphorothioate
  modified_base 22: mod_base = OTHER; note = 2'-O-methyluridine-3'-phosphorothioate
  modified_base 23: mod_base = OTHER; note = 2'-O-methylcytidine-3'-phosphate
  misc_feature 1..4: note = RNA
  misc_feature 5: note = DNA
  misc_feature 6: note = RNA
  misc_feature 7: note = DNA
  misc_feature 8..23: note = RNA
taagcttgcattccaccagcttc

SEQ ID NO: 1059 - DNA, 23 bp, synthetic construct
  source 1..23: mol_type = other DNA
  modified_base 1: mod_base = OTHER; note = Vinyl-phosphonate-2'-O-methyluridine-3'-phosphate
  modified_base 3: mod_base = OTHER; note = 2'-O-methyladenosine-3'-phosphate
  modified_base 4: mod_base = OTHER; note = 2'-O-methylguanosine-3'-phosphate
  modified_base 6: mod_base = OTHER; note = 2'-O-methylcytidine-3'-phosphate
  modified_base 8: mod_base = OTHER; note = 2'-O-methyluridine-3'-phosphate
  modified_base 9: mod_base = OTHER; note = 2'-O-methyluridine-3'-phosphate
  modified_base 10: mod_base = OTHER; note = 2'-O-methylguanosine-3'-phosphate
  modified_base 11: mod_base = OTHER; note = 2'-O-methyladenosine-3'-phosphate
  modified_base 13: mod_base = OTHER; note = 2'-O-methyluridine-3'-phosphate
  modified_base 14: mod_base = OTHER; note = 2'-fluorouridine-3'-phosphate
  modified_base 15: mod_base = OTHER; note = 2'-O-methylguanosine-3'-phosphate
  modified_base 16: mod_base = OTHER; note = 2'-O-methylguanosine-3'-phosphate
  modified_base 17: mod_base = OTHER; note = 2'-O-methyladenosine-3'-phosphate
  modified_base 18: mod_base = OTHER; note = 2'-O-methyluridine-3'-phosphate
  modified_base 19: mod_base = OTHER; note = 2'-O-methylcytidine-3'-phosphate
  modified_base 20: mod_base = OTHER; note = 2'-O-methyluridine-3'-phosphate
  modified_base 21: mod_base = OTHER; note = 2'-O-methylguanosine-3'-phosphorothioate
  modified_base 22: mod_base = OTHER; note = 2'-O-methyluridine-3'-phosphorothioate
  modified_base 23: mod_base = OTHER; note = 2'-O-methylcytidine-3'-phosphate
  misc_feature 1: note = RNA
  misc_feature 2: note = DNA
  misc_feature 3..4: note = RNA
  misc_feature 5: note = DNA
  misc_feature 6: note = RNA
  misc_feature 7: note = DNA
  misc_feature 8..11: note = RNA
  misc_feature 12: note = DNA
  misc_feature 13..23: note = RNA
taagacgttgacttggatctgtc

SEQ ID NO: 1060 - DNA, 23 bp, synthetic construct
  source 1..23: mol_type = other DNA
  modified_base 1: mod_base = OTHER; note = Vinyl-phosphonate-2'-O-methyluridine-3'-phosphate
  modified_base 2: mod_base = OTHER; note = 2'-fluorouridine-3'-phosphate
  modified_base 3: mod_base = OTHER; note = 2'-O-methylguanosine-3'-phosphate
  modified_base 4: mod_base = OTHER; note = 2'-O-methyladenosine-3'-phosphate
  modified_base 6: mod_base = OTHER; note = 2'-O-methylcytidine-3'-phosphate
  modified_base 7: mod_base = OTHER; note = Adenosine-glycol nucleic acid (GNA)
  modified_base 8: mod_base = OTHER; note = 2'-O-methyladenosine-3'-phosphate
  modified_base 9: mod_base = OTHER; note = 2'-O-methylguanosine-3'-phosphate
  modified_base 10: mod_base = OTHER; note = 2'-O-methyladenosine-3'-phosphate
  modified_base 11: mod_base = OTHER; note = 2'-O-methylcytidine-3'-phosphate
  modified_base 12: mod_base = OTHER; note = 2'-O-methylguanosine-3'-phosphate
  modified_base 13: mod_base = OTHER; note = 2'-O-methyluridine-3'-phosphate
  modified_base 14: mod_base = OTHER; note = 2'-fluorouridine-3'-phosphate
  modified_base 15: mod_base = OTHER; note = 2'-O-methylguanosine-3'-phosphate
  modified_base 16: mod_base = OTHER; note = 2'-fluoroadenosine-3'-phosphate
  modified_base 17: mod_base = OTHER; note = 2'-O-methylcytidine-3'-phosphate
  modified_base 18: mod_base = OTHER; note = 2'-O-methyluridine-3'-phosphate
  modified_base 19: mod_base = OTHER; note = 2'-O-methyluridine-3'-phosphate
  modified_base 20: mod_base = OTHER; note = 2'-O-methylguanosine-3'-phosphate
  modified_base 21: mod_base = OTHER; note = 2'-O-methylguanosine-3'-phosphorothioate
  modified_base 22: mod_base = OTHER; note = 2'-O-methyladenosine-3'-phosphorothioate
  modified_base 23: mod_base = OTHER; note = 2'-O-methyluridine-3'-phosphate
  misc_feature 1..4: note = RNA
  misc_feature 5: note = DNA
  misc_feature 6..23: note = RNA
ttgaacaagacgttgacttggat

SEQ ID NO: 1061 - DNA, 23 bp, synthetic construct
  source 1..23: mol_type = other DNA
  modified_base 1: mod_base = OTHER; note = Vinyl-phosphonate-2'-O-methyluridine-3'-phosphate
  modified_base 3: mod_base = OTHER; note = 2'-O-methylguanosine-3'-phosphate
  modified_base 4: mod_base = OTHER; note = 2'-O-methyladenosine-3'-phosphate
  modified_base 6: mod_base = OTHER; note = 2'-O-methylcytidine-3'-phosphate
  modified_base 8: mod_base = OTHER; note = 2'-O-methyladenosine-3'-phosphate
  modified_base 9: mod_base = OTHER; note = 2'-O-methylguanosine-3'-phosphate
  modified_base 10: mod_base = OTHER; note = 2'-O-methyladenosine-3'-phosphate
  modified_base 11: mod_base = OTHER; note = 2'-O-methylcytidine-3'-phosphate
  modified_base 13: mod_base = OTHER; note = 2'-O-methyluridine-3'-phosphate
  modified_base 14: mod_base = OTHER; note = 2'-fluorouridine-3'-phosphate
  modified_base 15: mod_base = OTHER; note = 2'-O-methylguanosine-3'-phosphate
  modified_base 16: mod_base = OTHER; note = 2'-O-methyladenosine-3'-phosphate
  modified_base 17: mod_base = OTHER; note = 2'-O-methylcytidine-3'-phosphate
  modified_base 18: mod_base = OTHER; note = 2'-O-methyluridine-3'-phosphate
  modified_base 19: mod_base = OTHER; note = 2'-O-methyluridine-3'-phosphate
  modified_base 20: mod_base = OTHER; note = 2'-O-methylguanosine-3'-phosphate
  modified_base 21: mod_base = OTHER; note = 2'-O-methylguanosine-3'-phosphorothioate
  modified_base 22: mod_base = OTHER; note = 2'-O-methyladenosine-3'-phosphorothioate
  modified_base 23: mod_base = OTHER; note = 2'-O-methyluridine-3'-phosphate
  misc_feature 1: note = RNA
  misc_feature 2: note = DNA
  misc_feature 3..4: note = RNA
  misc_feature 5: note = DNA
  misc_feature 6: note = RNA
  misc_feature 7: note = DNA
  misc_feature 8..11: note = RNA
  misc_feature 12: note = DNA
  misc_feature 13..23: note = RNA
ttgaacaagacgttgacttggat

SEQ ID NO: 1062 - DNA, 23 bp, synthetic construct
  source 1..23: mol_type = other DNA
  modified_base 1: mod_base = OTHER; note = Vinyl-phosphonate-2'-O-methyluridine-3'-phosphate
  modified_base 2: mod_base = OTHER; note = 2'-fluoroguanosine-3'-phosphate
  modified_base 3: mod_base = OTHER; note = 2'-O-methyladenosine-3'-phosphate
  modified_base 4: mod_base = OTHER; note = 2'-O-methylguanosine-3'-phosphate
  modified_base 6: mod_base = OTHER; note = 2'-O-methylguanosine-3'-phosphate
  modified_base 7: mod_base = OTHER; note = Thymidine-glycol nucleic acid (GNA) S-Isomer
  modified_base 8: mod_base = OTHER; note = 2'-O-methylcytidine-3'-phosphate
  modified_base 9: mod_base = OTHER; note = 2'-O-methylcytidine-3'-phosphate
  modified_base 10: mod_base = OTHER; note = 2'-O-methyladenosine-3'-phosphate
  modified_base 11: mod_base = OTHER; note = 2'-O-methyladenosine-3'-phosphate
  modified_base 12: mod_base = OTHER; note = 2'-O-methyladenosine-3'-phosphate
  modified_base 13: mod_base = OTHER; note = 2'-O-methylguanosine-3'-phosphate
  modified_base 14: mod_base = OTHER; note = 2'-fluoroadenosine-3'-phosphate
  modified_base 15: mod_base = OTHER; note = 2'-O-methylcytidine-3'-phosphate
  modified_base 16: mod_base = OTHER; note = 2'-fluoroadenosine-3'-phosphate
  modified_base 17: mod_base = OTHER; note = 2'-O-methylguanosine-3'-phosphate
  modified_base 18: mod_base = OTHER; note = 2'-O-methyluridine-3'-phosphate
  modified_base 19: mod_base = OTHER; note = 2'-O-methyluridine-3'-phosphate
  modified_base 20: mod_base = OTHER; note = 2'-O-methylcytidine-3'-phosphate
  modified_base 21: mod_base = OTHER; note = 2'-O-methyluridine-3'-phosphorothioate
  modified_base 22: mod_base = OTHER; note = 2'-O-methylguanosine-3'-phosphorothioate
  modified_base 23: mod_base = OTHER; note = 2'-O-methyladenosine-3'-phosphate
  misc_feature 1..4: note = RNA
  misc_feature 5: note = DNA
  misc_feature 6: note = RNA
  misc_feature 7: note = DNA
  misc_feature 8..23: note = RNA
tgagagtccaaagacagttctga

SEQ ID NO: 1063 - DNA, 23 bp, synthetic construct
  source 1..23: mol_type = other DNA
  modified_base 1: mod_base = OTHER; note = Vinyl-phosphonate-2'-O-methyluridine-3'-phosphate
  modified_base 2: mod_base = OTHER; note = 2'-fluorouridine-3'-phosphate
  modified_base 3: mod_base = OTHER; note = 2'-O-methyluridine-3'-phosphate
  modified_base 4: mod_base = OTHER; note = 2'-O-methyladenosine-3'-phosphate
  modified_base 6: mod_base = OTHER; note = 2'-O-methyluridine-3'-phosphate
  modified_base 7: mod_base = OTHER; note = Thymidine-glycol nucleic acid (GNA) S-Isomer
  modified_base 8: mod_base = OTHER; note = 2'-O-methylguanosine-3'-phosphate
  modified_base 9: mod_base = OTHER; note = 2'-O-methylcytidine-3'-phosphate
  modified_base 10: mod_base = OTHER; note = 2'-O-methyladenosine-3'-phosphate
  modified_base 11: mod_base = OTHER; note = 2'-O-methylguanosine-3'-phosphate
  modified_base 12: mod_base = OTHER; note = 2'-O-methylcytidine-3'-phosphate
  modified_base 13: mod_base = OTHER; note = 2'-O-methyladenosine-3'-phosphate
  modified_base 14: mod_base = OTHER; note = 2'-fluorouridine-3'-phosphate
  modified_base 15: mod_base = OTHER; note = 2'-O-methylcytidine-3'-phosphate
  modified_base 16: mod_base = OTHER; note = 2'-fluorouridine-3'-phosphate
  modified_base 17: mod_base = OTHER; note = 2'-O-methylguanosine-3'-phosphate
  modified_base 18: mod_base = OTHER; note = 2'-O-methyladenosine-3'-phosphate
  modified_base 19: mod_base = OTHER; note = 2'-O-methyladenosine-3'-phosphate
  modified_base 20: mod_base = OTHER; note = 2'-O-methyladenosine-3'-phosphate
  modified_base 21: mod_base = OTHER; note = 2'-O-methylguanosine-3'-phosphorothioate
  modified_base 22: mod_base = OTHER; note = 2'-O-methyladenosine-3'-phosphorothioate
  modified_base 23: mod_base = OTHER; note = 2'-O-methyluridine-3'-phosphate
  misc_feature 1..4: note = RNA
  misc_feature 5: note = DNA
  misc_feature 6: note = RNA
  misc_feature 7: note = DNA
  misc_feature 8..23: note = RNA
tttagttgcagcatctgaaagat

SEQ ID NO: 1064 - DNA, 23 bp, synthetic construct
  source 1..23: mol_type = other DNA
  modified_base 1: mod_base = OTHER; note = Vinyl-phosphonate-2'-O-methyluridine-3'-phosphate
  modified_base 2: mod_base = OTHER; note = 2'-fluorouridine-3'-phosphate
  modified_base 3: mod_base = OTHER; note = 2'-O-methylguanosine-3'-phosphate
  modified_base 4: mod_base = OTHER; note = 2'-O-methyluridine-3'-phosphate
  modified_base 6: mod_base = OTHER; note = 2'-O-methyluridine-3'-phosphate
  modified_base 7: mod_base = OTHER; note = Adenosine-glycol nucleic acid (GNA)
  modified_base 8: mod_base = OTHER; note = 2'-O-methylguanosine-3'-phosphate
  modified_base 9: mod_base = OTHER; note = 2'-O-methyluridine-3'-phosphate
  modified_base 10: mod_base = OTHER; note = 2'-O-methyluridine-3'-phosphate
  modified_base 11: mod_base = OTHER; note = 2'-O-methylguanosine-3'-phosphate
  modified_base 12: mod_base = OTHER; note = 2'-O-methylcytidine-3'-phosphate
  modified_base 13: mod_base = OTHER; note = 2'-O-methyladenosine-3'-phosphate
  modified_base 14: mod_base = OTHER; note = 2'-fluoroguanosine-3'-phosphate
  modified_base 15: mod_base = OTHER; note = 2'-O-methylcytidine-3'-phosphate
  modified_base 16: mod_base = OTHER; note = 2'-fluoroadenosine-3'-phosphate
  modified_base 17: mod_base = OTHER; note = 2'-O-methyluridine-3'-phosphate
  modified_base 18: mod_base = OTHER; note = 2'-O-methylcytidine-3'-phosphate
  modified_base 19: mod_base = OTHER; note = 2'-O-methyluridine-3'-phosphate
  modified_base 20: mod_base = OTHER; note = 2'-O-methylguanosine-3'-phosphate
  modified_base 21: mod_base = OTHER; note = 2'-O-methyladenosine-3'-phosphorothioate
  modified_base 22: mod_base = OTHER; note = 2'-O-methyladenosine-3'-phosphorothioate
  modified_base 23: mod_base = OTHER; note = 2'-O-methyladenosine-3'-phosphate
  misc_feature 1..4: note = RNA
  misc_feature 5: note = DNA
  misc_feature 6..23: note = RNA
ttgtttagttgcagcatctgaaa

SEQ ID NO: 1065 - DNA, 23 bp, synthetic construct
  source 1..23: mol_type = other DNA
  modified_base 1: mod_base = OTHER; note = Vinyl-phosphonate-2'-O-methyluridine-3'-phosphate
  modified_base 2: mod_base = OTHER; note = 2'-fluorouridine-3'-phosphate
  modified_base 3: mod_base = OTHER; note = 2'-O-methylcytidine-3'-phosphate
  modified_base 4: mod_base = OTHER; note = 2'-O-methylcytidine-3'-phosphate
  modified_base 6: mod_base = OTHER; note = 2'-O-methylguanosine-3'-phosphate
  modified_base 7: mod_base = OTHER; note = Thymidine-glycol nucleic acid (GNA) S-Isomer
  modified_base 8: mod_base = OTHER; note = 2'-O-methyluridine-3'-phosphate
  modified_base 9: mod_base = OTHER; note = 2'-O-methyluridine-3'-phosphate
  modified_base 10: mod_base = OTHER; note = 2'-O-methyladenosine-3'-phosphate
  modified_base 11: mod_base = OTHER; note = 2'-O-methylguanosine-3'-phosphate
  modified_base 12: mod_base = OTHER; note = 2'-O-methyluridine-3'-phosphate
  modified_base 13: mod_base = OTHER; note = 2'-O-methyluridine-3'-phosphate
  modified_base 14: mod_base = OTHER; note = 2'-fluoroguanosine-3'-phosphate
  modified_base 15: mod_base = OTHER; note = 2'-O-methylcytidine-3'-phosphate
  modified_base 16: mod_base = OTHER; note = 2'-fluoroadenosine-3'-phosphate
  modified_base 17: mod_base = OTHER; note = 2'-O-methylguanosine-3'-phosphate
  modified_base 18: mod_base = OTHER; note = 2'-O-methylcytidine-3'-phosphate
  modified_base 19: mod_base = OTHER; note = 2'-O-methyladenosine-3'-phosphate
  modified_base 20: mod_base = OTHER; note = 2'-O-methyluridine-3'-phosphate
  modified_base 21: mod_base = OTHER; note = 2'-O-methylcytidine-3'-phosphorothioate
  modified_base 22: mod_base = OTHER; note = 2'-O-methyluridine-3'-phosphorothioate
  modified_base 23: mod_base = OTHER; note = 2'-O-methylguanosine-3'-phosphate
  misc_feature 1..4: note = RNA
  misc_feature 5: note = DNA
  misc_feature 6: note = RNA
  misc_feature 7: note = DNA
  misc_feature 8..23: note = RNA
ttcctgtttagttgcagcatctg

SEQ ID NO: 1066 - DNA, 23 bp, synthetic construct
  source 1..23: mol_type = other DNA
  modified_base 1: mod_base = OTHER; note = Vinyl-phosphonate-2'-O-methyluridine-3'-phosphate
  modified_base 3: mod_base = OTHER; note = 2'-O-methylcytidine-3'-phosphate
  modified_base 4: mod_base = OTHER; note = 2'-O-methylcytidine-3'-phosphate
  modified_base 6: mod_base = OTHER; note = 2'-O-methyluridine-3'-phosphate
  modified_base 8: mod_base = OTHER; note = 2'-O-methylcytidine-3'-phosphate
  modified_base 9: mod_base = OTHER; note = 2'-O-methyluridine-3'-phosphate
  modified_base 10: mod_base = OTHER; note = 2'-O-methylguanosine-3'-phosphate
  modified_base 11: mod_base = OTHER; note = 2'-O-methyluridine-3'-phosphate
  modified_base 13: mod_base = OTHER; note = 2'-O-methyluridine-3'-phosphate
  modified_base 14: mod_base = OTHER; note = 2'-fluoroadenosine-3'-phosphate
  modified_base 15: mod_base = OTHER; note = 2'-O-methylguanosine-3'-phosphate
  modified_base 16: mod_base = OTHER; note = 2'-O-methyluridine-3'-phosphate
  modified_base 17: mod_base = OTHER; note = 2'-O-methyluridine-3'-phosphate
  modified_base 18: mod_base = OTHER; note = 2'-O-methylguanosine-3'-phosphate
  modified_base 19: mod_base = OTHER; note = 2'-O-methylcytidine-3'-phosphate
  modified_base 20: mod_base = OTHER; note = 2'-O-methyladenosine-3'-phosphate
  modified_base 21: mod_base = OTHER; note = 2'-O-methylguanosine-3'-phosphorothioate
  modified_base 22: mod_base = OTHER; note = 2'-O-methylcytidine-3'-phosphorothioate
  modified_base 23: mod_base = OTHER; note = 2'-O-methyladenosine-3'-phosphate
  misc_feature 1: note = RNA
  misc_feature 2: note = DNA
  misc_feature 3..4: note = RNA
  misc_feature 5: note = DNA
  misc_feature 6: note = RNA
  misc_feature 7: note = DNA
  misc_feature 8..11: note = RNA
  misc_feature 12: note = DNA
  misc_feature 13..23: note = RNA
tcccttcctgtttagttgcagca

SEQ ID NO: 1067 - DNA, 23 bp, synthetic construct
  source 1..23: mol_type = other DNA
  modified_base 1: mod_base = OTHER; note = Vinyl-phosphonate-2'-O-methyluridine-3'-phosphate
  modified_base 2: mod_base = OTHER; note = 2'-fluoroadenosine-3'-phosphate
  modified_base 3: mod_base = OTHER; note = 2'-O-methylguanosine-3'-phosphate
  modified_base 4: mod_base = OTHER; note = 2'-O-methylguanosine-3'-phosphate
  modified_base 6: mod_base = OTHER; note = 2'-O-methylguanosine-3'-phosphate
  modified_base 7: mod_base = OTHER; note = Adenosine-glycol nucleic acid (GNA)
  modified_base 8: mod_base = OTHER; note = 2'-O-methylcytidine-3'-phosphate
  modified_base 9: mod_base = OTHER; note = 2'-O-methylcytidine-3'-phosphate
  modified_base 10: mod_base = OTHER; note = 2'-O-methyluridine-3'-phosphate
  modified_base 11: mod_base = OTHER; note = 2'-O-methyluridine-3'-phosphate
  modified_base 12: mod_base = OTHER; note = 2'-O-methylcytidine-3'-phosphate
  modified_base 13: mod_base = OTHER; note = 2'-O-methylcytidine-3'-phosphate
  modified_base 14: mod_base = OTHER; note = 2'-fluoroadenosine-3'-phosphate
  modified_base 15: mod_base = OTHER; note = 2'-O-methyluridine-3'-phosphate
  modified_base 16: mod_base = OTHER; note = 2'-fluorocytidine-3'-phosphate
  modified_base 17: mod_base = OTHER; note = 2'-O-methylcytidine-3'-phosphate
  modified_base 18: mod_base = OTHER; note = 2'-O-methylcytidine-3'-phosphate
  modified_base 19: mod_base = OTHER; note = 2'-O-methyluridine-3'-phosphate
  modified_base 20: mod_base = OTHER; note = 2'-O-methyluridine-3'-phosphate
  modified_base 21: mod_base = OTHER; note = 2'-O-methylcytidine-3'-phosphorothioate
  modified_base 22: mod_base = OTHER; note = 2'-O-methylcytidine-3'-phosphorothioate
  modified_base 23: mod_base = OTHER; note = 2'-O-methyluridine-3'-phosphate
  misc_feature 1..4: note = RNA
  misc_feature 5: note = DNA
  misc_feature 6..23: note = RNA
taggagaccttccatcccttcct

SEQ ID NO: 1068 - DNA, 23 bp, synthetic construct
  source 1..23: mol_type = other DNA
  modified_base 1: mod_base = OTHER; note = Vinyl-phosphonate-2'-O-methyluridine-3'-phosphate
  modified_base 2: mod_base = OTHER; note = 2'-fluoroadenosine-3'-phosphate
  modified_base 3: mod_base = OTHER; note = 2'-O-methyluridine-3'-phosphate
  modified_base 4: mod_base = OTHER; note = 2'-O-methyladenosine-3'-phosphate
  modified_base 6: mod_base = OTHER; note = 2'-O-methylcytidine-3'-phosphate
  modified_base 7: mod_base = OTHER; note = Adenosine-glycol nucleic acid (GNA)
  modified_base 8: mod_base = OTHER; note = 2'-O-methyluridine-3'-phosphate
  modified_base 9: mod_base = OTHER; note = 2'-O-methylcytidine-3'-phosphate
  modified_base 10: mod_base = OTHER; note = 2'-O-methyluridine-3'-phosphate
  modified_base 11: mod_base = OTHER; note = 2'-O-methylguanosine-3'-phosphate
  modified_base 12: mod_base = OTHER; note = 2'-O-methyladenosine-3'-phosphate
  modified_base 13: mod_base = OTHER; note = 2'-O-methyladenosine-3'-phosphate
  modified_base 14: mod_base = OTHER; note = 2'-fluorocytidine-3'-phosphate
  modified_base 15: mod_base = OTHER; note = 2'-O-methylcytidine-3'-phosphate
  modified_base 16: mod_base = OTHER; note = 2'-fluorocytidine-3'-phosphate
  modified_base 17: mod_base = OTHER; note = 2'-O-methyladenosine-3'-phosphate
  modified_base 18: mod_base = OTHER; note = 2'-O-methylguanosine-3'-phosphate
  modified_base 19: mod_base = OTHER; note = 2'-O-methyladenosine-3'-phosphate
  modified_base 20: mod_base = OTHER; note = 2'-O-methyladenosine-3'-phosphate
  modified_base 21: mod_base = OTHER; note = 2'-O-methylguanosine-3'-phosphorothioate
  modified_base 22: mod_base = OTHER; note = 2'-O-methylcytidine-3'-phosphorothioate
  modified_base 23: mod_base = OTHER; note = 2'-O-methyluridine-3'-phosphate
  misc_feature 1..4: note = RNA
  misc_feature 5: note = DNA
  misc_feature 6..23: note = RNA
tatatcatctgaacccagaagct

SEQ ID NO: 1069 - DNA, 23 bp, synthetic construct
  source 1..23: mol_type = other DNA
  modified_base 1: mod_base = OTHER; note = Vinyl-phosphonate-2'-O-methyluridine-3'-phosphate
  modified_base 3: mod_base = OTHER; note = 2'-O-methyladenosine-3'-phosphate
  modified_base 4: mod_base = OTHER; note = 2'-O-methylguanosine-3'-phosphate
  modified_base 6: mod_base = OTHER; note = 2'-O-methyladenosine-3'-phosphate
  modified_base 8: mod_base = OTHER; note = 2'-O-methyluridine-3'-phosphate
  modified_base 9: mod_base = OTHER; note = 2'-O-methylcytidine-3'-phosphate
  modified_base 10: mod_base = OTHER; note = 2'-O-methylcytidine-3'-phosphate
  modified_base 11: mod_base = OTHER; note = 2'-O-methyladenosine-3'-phosphate
  modified_base 13: mod_base = OTHER; note = 2'-O-methylcytidine-3'-phosphate
  modified_base 14: mod_base = OTHER; note = 2'-fluorouridine-3'-phosphate
  modified_base 15: mod_base = OTHER; note = 2'-O-methylguanosine-3'-phosphate
  modified_base 16: mod_base = OTHER; note = 2'-O-methylcytidine-3'-phosphate
  modified_base 17: mod_base = OTHER; note = 2'-O-methyladenosine-3'-phosphate
  modified_base 18: mod_base = OTHER; note = 2'-O-methylcytidine-3'-phosphate
  modified_base 19: mod_base = OTHER; note = 2'-O-methyladenosine-3'-phosphate
  modified_base 20: mod_base = OTHER; note = 2'-O-methylguanosine-3'-phosphate
  modified_base 21: mod_base = OTHER; note = 2'-O-methylguanosine-3'-phosphorothioate
  modified_base 22: mod_base = OTHER; note = 2'-O-methyluridine-3'-phosphorothioate
  modified_base 23: mod_base = OTHER; note = 2'-O-methylguanosine-3'-phosphate
  misc_feature 1: note = RNA
  misc_feature 2: note = DNA
  misc_feature 3..4: note = RNA
  misc_feature 5: note = DNA
  misc_feature 6: note = RNA
  misc_feature 7: note = DNA
  misc_feature 8..11: note = RNA
  misc_feature 12: note = DNA
  misc_feature 13..23: note = RNA
taagaattccagctgcacaggtg

SEQ ID NO: 1070 - DNA, 23 bp, synthetic construct
  source 1..23: mol_type = other DNA
  modified_base 1: mod_base = OTHER; note = Vinyl-phosphonate-2'-O-methyluridine-3'-phosphate
  modified_base 3: mod_base = OTHER; note = 2'-O-methyladenosine-3'-phosphate
  modified_base 4: mod_base = OTHER; note = 2'-O-methyladenosine-3'-phosphate
  modified_base 6: mod_base = OTHER; note = 2'-O-methylguanosine-3'-phosphate
  modified_base 8: mod_base = OTHER; note = 2'-O-methyladenosine-3'-phosphate
  modified_base 9: mod_base = OTHER; note = 2'-O-methyluridine-3'-phosphate
  modified_base 10: mod_base = OTHER; note = 2'-O-methyluridine-3'-phosphate
  modified_base 11: mod_base = OTHER; note = 2'-O-methylcytidine-3'-phosphate
  modified_base 13: mod_base = OTHER; note = 2'-O-methyladenosine-3'-phosphate
  modified_base 14: mod_base = OTHER; note = 2'-fluoroguanosine-3'-phosphate
  modified_base 15: mod_base = OTHER; note = 2'-O-methylcytidine-3'-phosphate
  modified_base 16: mod_base = OTHER; note = 2'-O-methyluridine-3'-phosphate
  modified_base 17: mod_base = OTHER; note = 2'-O-methylguanosine-3'-phosphate
  modified_base 18: mod_base = OTHER; note = 2'-O-methylcytidine-3'-phosphate
  modified_base 19: mod_base = OTHER; note = 2'-O-methyladenosine-3'-phosphate
  modified_base 20: mod_base = OTHER; note = 2'-O-methylcytidine-3'-phosphate
  modified_base 21: mod_base = OTHER; note = 2'-O-methyladenosine-3'-phosphorothioate
  modified_base 22: mod_base = OTHER; note = 2'-O-methylguanosine-3'-phosphorothioate
  modified_base 23: mod_base = OTHER; note = 2'-O-methylguanosine-3'-phosphate
  misc_feature 1: note = RNA
  misc_feature 2: note = DNA
  misc_feature 3..4: note = RNA
  misc_feature 5: note = DNA
  misc_feature 6: note = RNA
  misc_feature 7: note = DNA
  misc_feature 8..11: note = RNA
  misc_feature 12: note = DNA
  misc_feature 13..23: note = RNA
tgaaagaattccagctgcacagg

SEQ ID NO: 1071 - DNA, 23 bp, synthetic construct
  source 1..23: mol_type = other DNA
  modified_base 1: mod_base = OTHER; note = Vinyl-phosphonate-2'-O-methyluridine-3'-phosphate
  modified_base 2: mod_base = OTHER; note = 2'-fluoroadenosine-3'-phosphate
  modified_base 3: mod_base = OTHER; note = 2'-O-methyladenosine-3'-phosphate
  modified_base 4: mod_base = OTHER; note = 2'-O-methylguanosine-3'-phosphate
  modified_base 6: mod_base = OTHER; note = 2'-O-methylguanosine-3'-phosphate
  modified_base 7: mod_base = OTHER; note = Adenosine-glycol nucleic acid (GNA)
  modified_base 8: mod_base = OTHER; note = 2'-O-methylguanosine-3'-phosphate
  modified_base 9: mod_base = OTHER; note = 2'-O-methylguanosine-3'-phosphate
  modified_base 10: mod_base = OTHER; note = 2'-O-methyluridine-3'-phosphate
  modified_base 11: mod_base = OTHER; note = 2'-O-methyluridine-3'-phosphate
  modified_base 12: mod_base = OTHER; note = 2'-O-methyladenosine-3'-phosphate
  modified_base 13: mod_base = OTHER; note = 2'-O-methylguanosine-3'-phosphate
  modified_base 14: mod_base = OTHER; note = 2'-fluoroadenosine-3'-phosphate
  modified_base 15: mod_base = OTHER; note = 2'-O-methyladenosine-3'-phosphate
  modified_base 16: mod_base = OTHER; note = 2'-fluoroadenosine-3'-phosphate
  modified_base 17: mod_base = OTHER; note = 2'-O-methylguanosine-3'-phosphate
  modified_base 18: mod_base = OTHER; note = 2'-O-methyladenosine-3'-phosphate
  modified_base 19: mod_base = OTHER; note = 2'-O-methyladenosine-3'-phosphate
  modified_base 20: mod_base = OTHER; note = 2'-O-methyluridine-3'-phosphate
  modified_base 21: mod_base = OTHER; note = 2'-O-methyluridine-3'-phosphorothioate
  modified_base 22: mod_base = OTHER; note = 2'-O-methylcytidine-3'-phosphorothioate
  modified_base 23: mod_base = OTHER; note = 2'-O-methylcytidine-3'-phosphate
  misc_feature 1..4: note = RNA
  misc_feature 5: note = DNA
  misc_feature 6..23: note = RNA
taagtgaggttagaaagaattcc

SEQ ID NO: 1072 - DNA, 23 bp, synthetic construct
  source 1..23: mol_type = other DNA
  modified_base 1: mod_base = OTHER; note = Vinyl-phosphonate-2'-O-methyluridine-3'-phosphate
  modified_base 3: mod_base = OTHER; note = 2'-O-methylcytidine-3'-phosphate
  modified_base 4: mod_base = OTHER; note = 2'-O-methyladenosine-3'-phosphate
  modified_base 6: mod_base = OTHER; note = 2'-O-methylguanosine-3'-phosphate
  modified_base 8: mod_base = OTHER; note = 2'-O-methylguanosine-3'-phosphate
  modified_base 9: mod_base = OTHER; note = 2'-O-methyladenosine-3'-phosphate
  modified_base 10: mod_base = OTHER; note = 2'-O-methylguanosine-3'-phosphate
  modified_base 11: mod_base = OTHER; note = 2'-O-methylguanosine-3'-phosphate
  modified_base 13: mod_base = OTHER; note = 2'-O-methyluridine-3'-phosphate
  modified_base 14: mod_base = OTHER; note = 2'-fluoroadenosine-3'-phosphate
  modified_base 15: mod_base = OTHER; note = 2'-O-methylguanosine-3'-phosphate
  modified_base 16: mod_base = OTHER; note = 2'-O-methyladenosine-3'-phosphate
  modified_base 17: mod_base = OTHER; note = 2'-O-methyladenosine-3'-phosphate
  modified_base 18: mod_base = OTHER; note = 2'-O-methyladenosine-3'-phosphate
  modified_base 19: mod_base = OTHER; note = 2'-O-methylguanosine-3'-phosphate
  modified_base 20: mod_base = OTHER; note = 2'-O-methyladenosine-3'-phosphate
  modified_base 21: mod_base = OTHER; note = 2'-O-methyladenosine-3'-phosphorothioate
  modified_base 22: mod_base = OTHER; note = 2'-O-methyluridine-3'-phosphorothioate
  modified_base 23: mod_base = OTHER; note = 2'-O-methyluridine-3'-phosphate
  misc_feature 1: note = RNA
  misc_feature 2: note = DNA
  misc_feature 3..4: note = RNA
  misc_feature 5: note = DNA
  misc_feature 6: note = RNA
  misc_feature 7: note = DNA
  misc_feature 8..11: note = RNA
  misc_feature 12: note = DNA
  misc_feature 13..23: note = RNA
tgcaagtgaggttagaaagaatt

SEQ ID NO: 1073 - DNA, 23 bp, synthetic construct
  source 1..23: mol_type = other DNA
  modified_base 1: mod_base = OTHER; note = Vinyl-phosphonate-2'-O-methyluridine-3'-phosphate
  modified_base 2: mod_base = OTHER; note = 2'-fluorouridine-3'-phosphate
  modified_base 3: mod_base = OTHER; note = 2'-O-methyluridine-3'-phosphate
  modified_base 4: mod_base = OTHER; note = 2'-O-methylguanosine-3'-phosphate
  modified_base 6: mod_base = OTHER; note = 2'-O-methyladenosine-3'-phosphate
  modified_base 7: mod_base = OTHER; note = Adenosine-glycol nucleic acid (GNA)
  modified_base 8: mod_base = OTHER; note = 2'-O-methylguanosine-3'-phosphate
  modified_base 9: mod_base = OTHER; note = 2'-O-methyluridine-3'-phosphate
  modified_base 10: mod_base = OTHER; note = 2'-O-methylguanosine-3'-phosphate
  modified_base 11: mod_base = OTHER; note = 2'-O-methyladenosine-3'-phosphate
  modified_base 12: mod_base = OTHER; note = 2'-O-methylguanosine-3'-phosphate
  modified_base 13: mod_base = OTHER; note = 2'-O-methylguanosine-3'-phosphate
  modified_base 14: mod_base = OTHER; note = 2'-fluorouridine-3'-phosphate
  modified_base 15: mod_base = OTHER; note = 2'-O-methyluridine-3'-phosphate
  modified_base 16: mod_base = OTHER; note = 2'-fluoroadenosine-3'-phosphate
  modified_base 17: mod_base = OTHER; note = 2'-O-methylguanosine-3'-phosphate
  modified_base 18: mod_base = OTHER; note = 2'-O-methyladenosine-3'-phosphate
  modified_base 19: mod_base = OTHER; note = 2'-O-methyladenosine-3'-phosphate
  modified_base 20: mod_base = OTHER; note = 2'-O-methyladenosine-3'-phosphate
  modified_base 21: mod_base = OTHER; note = 2'-O-methylguanosine-3'-phosphorothioate
  modified_base 22: mod_base = OTHER; note = 2'-O-methyladenosine-3'-phosphorothioate
  modified_base 23: mod_base = OTHER; note = 2'-O-methyladenosine-3'-phosphate
  misc_feature 1..4: note = RNA
  misc_feature 5: note = DNA
  misc_feature 6..23: note = RNA
tttgcaagtgaggttagaaagaa

SEQ ID NO: 1074 - DNA, 23 bp, synthetic construct
  source 1..23: mol_type = other DNA
  modified_base 1: mod_base = OTHER; note = Vinyl-phosphonate-2'-O-methyluridine-3'-phosphate
  modified_base 2: mod_base = OTHER; note = 2'-fluoroadenosine-3'-phosphate
  modified_base 3: mod_base = OTHER; note = 2'-O-methyluridine-3'-phosphate
  modified_base 4: mod_base = OTHER; note = 2'-O-methyluridine-3'-phosphate
  modified_base 6: mod_base = OTHER; note = 2'-O-methylcytidine-3'-phosphate
  modified_base 7: mod_base = OTHER; note = Adenosine-glycol nucleic acid (GNA)
  modified_base 8: mod_base = OTHER; note = 2'-O-methyladenosine-3'-phosphate
  modified_base 9: mod_base = OTHER; note = 2'-O-methylguanosine-3'-phosphate
  modified_base 10: mod_base = OTHER; note = 2'-O-methyluridine-3'-phosphate
  modified_base 11: mod_base = OTHER; note = 2'-O-methylguanosine-3'-phosphate
  modified_base 12: mod_base = OTHER; note = 2'-O-methyladenosine-3'-phosphate
  modified_base 13: mod_base = OTHER; note = 2'-O-methylguanosine-3'-phosphate
  modified_base 14: mod_base = OTHER; note = 2'-fluoroguanosine-3'-phosphate
  modified_base 15: mod_base = OTHER; note = 2'-O-methyluridine-3'-phosphate
  modified_base 16: mod_base = OTHER; note = 2'-fluorouridine-3'-phosphate
  modified_base 17: mod_base = OTHER; note = 2'-O-methyladenosine-3'-phosphate
  modified_base 18: mod_base = OTHER; note = 2'-O-methylguanosine-3'-phosphate
  modified_base 19: mod_base = OTHER; note = 2'-O-methyladenosine-3'-phosphate
  modified_base 20: mod_base = OTHER; note = 2'-O-methyladenosine-3'-phosphate
  modified_base 21: mod_base = OTHER; note = 2'-O-methyladenosine-3'-phosphorothioate
  modified_base 22: mod_base = OTHER; note = 2'-O-methylguanosine-3'-phosphorothioate
  modified_base 23: mod_base = OTHER; note = 2'-O-methyladenosine-3'-phosphate
  misc_feature 1..4: note = RNA
  misc_feature 5: note = DNA
  misc_feature 6..23: note = RNA
tattgcaagtgaggttagaaaga

SEQ ID NO: 1075 - DNA, 23 bp, synthetic construct
  source 1..23: mol_type = other DNA
  modified_base 1: mod_base = OTHER; note = Vinyl-phosphonate-2'-O-methyluridine-3'-phosphate
  modified_base 3: mod_base = OTHER; note = 2'-O-methyluridine-3'-phosphate
  modified_base 4: mod_base = OTHER; note = 2'-O-methyluridine-3'-phosphate
  modified_base 6: mod_base = OTHER; note = 2'-O-methyluridine-3'-phosphate
  modified_base 8: mod_base = OTHER; note = 2'-O-methylguanosine-3'-phosphate
  modified_base 9: mod_base = OTHER; note = 2'-O-methylcytidine-3'-phosphate
  modified_base 10: mod_base = OTHER; note = 2'-O-methyladenosine-3'-phosphate
  modified_base 11: mod_base = OTHER; note = 2'-O-methyladenosine-3'-phosphate
  modified_base 13: mod_base = OTHER; note = 2'-O-methyluridine-3'-phosphate
  modified_base 14: mod_base = OTHER; note = 2'-fluoroguanosine-3'-phosphate
  modified_base 15: mod_base = OTHER; note = 2'-O-methyladenosine-3'-phosphate
  modified_base 16: mod_base = OTHER; note = 2'-O-methylguanosine-3'-phosphate
  modified_base 17: mod_base = OTHER; note = 2'-O-methylguanosine-3'-phosphate
  modified_base 18: mod_base = OTHER; note = 2'-O-methyluridine-3'-phosphate
  modified_base 19: mod_base = OTHER; note = 2'-O-methyluridine-3'-phosphate
  modified_base 20: mod_base = OTHER; note = 2'-O-methyladenosine-3'-phosphate
  modified_base 21: mod_base = OTHER; note = 2'-O-methylguanosine-3'-phosphorothioate
  modified_base 22: mod_base = OTHER; note = 2'-O-methyladenosine-3'-phosphorothioate
  modified_base 23: mod_base = OTHER; note = 2'-O-methyladenosine-3'-phosphate
  misc_feature 1: note = RNA
  misc_feature 2: note = DNA
  misc_feature 3..4: note = RNA
  misc_feature 5: note = DNA
  misc_feature 6: note = RNA
  misc_feature 7: note = DNA
  misc_feature 8..11: note = RNA
  misc_feature 12: note = DNA
  misc_feature 13..23: note = RNA
tattattgcaagtgaggttagaa

SEQ ID NO: 1076 - DNA, 23 bp, synthetic construct
  source 1..23: mol_type = other DNA
  modified_base 1: mod_base = OTHER; note = Vinyl-phosphonate-2'-O-methyluridine-3'-phosphate
  modified_base 3: mod_base = OTHER; note = 2'-O-methyladenosine-3'-phosphate
  modified_base 4: mod_base = OTHER; note = 2'-O-methyluridine-3'-phosphate
  modified_base 6: mod_base = OTHER; note = 2'-O-methyladenosine-3'-phosphate
  modified_base 8: mod_base = OTHER; note = 2'-O-methyluridine-3'-phosphate
  modified_base 9: mod_base = OTHER; note = 2'-O-methylguanosine-3'-phosphate
  modified_base 10: mod_base = OTHER; note = 2'-O-methylcytidine-3'-phosphate
  modified_base 11: mod_base = OTHER; note = 2'-O-methyladenosine-3'-phosphate
  modified_base 13: mod_base = OTHER; note = 2'-O-methylguanosine-3'-phosphate
  modified_base 14: mod_base = OTHER; note = 2'-fluorouridine-3'-phosphate
  modified_base 15: mod_base = OTHER; note = 2'-O-methylguanosine-3'-phosphate
  modified_base 16: mod_base = OTHER; note = 2'-O-methyladenosine-3'-phosphate
  modified_base 17: mod_base = OTHER; note = 2'-O-methylguanosine-3'-phosphate
  modified_base 18: mod_base = OTHER; note = 2'-O-methylguanosine-3'-phosphate
  modified_base 19: mod_base = OTHER; note = 2'-O-methyluridine-3'-phosphate
  modified_base 20: mod_base = OTHER; note = 2'-O-methyluridine-3'-phosphate
  modified_base 21: mod_base = OTHER; note = 2'-O-methyladenosine-3'-phosphorothioate
  modified_base 22: mod_base = OTHER; note = 2'-O-methylguanosine-3'-phosphorothioate
  modified_base 23: mod_base = OTHER; note = 2'-O-methyladenosine-3'-phosphate
  misc_feature 1: note = RNA
  misc_feature 2: note = DNA
  misc_feature 3..4: note = RNA
  misc_feature 5: note = DNA
  misc_feature 6: note = RNA
  misc_feature 7: note = DNA
  misc_feature 8..11: note = RNA
  misc_feature 12: note = DNA
  misc_feature 13..23: note = RNA
taattattgcaagtgaggttaga

SEQ ID NO: 1077 - DNA, 23 bp, synthetic construct
  source 1..23: mol_type = other DNA
  modified_base 1: mod_base = OTHER; note = Vinyl-phosphonate-2'-O-methyluridine-3'-phosphate
  modified_base 3: mod_base = OTHER; note = 2'-O-methyladenosine-3'-phosphate
  modified_base 4: mod_base = OTHER; note = 2'-O-methyladenosine-3'-phosphate
  modified_base 6: mod_base = OTHER; note = 2'-O-methyluridine-3'-phosphate
  modified_base 8: mod_base = OTHER; note = 2'-O-methyluridine-3'-phosphate
  modified_base 9: mod_base = OTHER; note = 2'-O-methyluridine-3'-phosphate
  modified_base 10: mod_base = OTHER; note = 2'-O-methylguanosine-3'-phosphate
  modified_base 11: mod_base = OTHER; note = 2'-O-methylcytidine-3'-phosphate
  modified_base 13: mod_base = OTHER; note = 2'-O-methyladenosine-3'-phosphate
  modified_base 14: mod_base = OTHER; note = 2'-fluoroguanosine-3'-phosphate
  modified_base 15: mod_base = OTHER; note = 2'-O-methyluridine-3'-phosphate
  modified_base 16: mod_base = OTHER; note = 2'-O-methylguanosine-3'-phosphate
  modified_base 17: mod_base = OTHER; note = 2'-O-methyladenosine-3'-phosphate
  modified_base 18: mod_base = OTHER; note = 2'-O-methylguanosine-3'-phosphate
  modified_base 19: mod_base = OTHER; note = 2'-O-methylguanosine-3'-phosphate
  modified_base 20: mod_base = OTHER; note = 2'-O-methyluridine-3'-phosphate
  modified_base 21: mod_base = OTHER; note = 2'-O-methyluridine-3'-phosphorothioate
  modified_base 22: mod_base = OTHER; note = 2'-O-methyladenosine-3'-phosphorothioate
  modified_base 23: mod_base = OTHER; note = 2'-O-methylguanosine-3'-phosphate
  misc_feature 1: note = RNA
  misc_feature 2: note = DNA
  misc_feature 3..4: note = RNA
  misc_feature 5: note = DNA
  misc_feature 6: note = RNA
  misc_feature 7: note = DNA
  misc_feature 8..11: note = RNA
  misc_feature 12: note = DNA
  misc_feature 13..23: note = RNA
ttaattattgcaagtgaggttag

SEQ ID NO: 1078 - DNA, 23 bp, synthetic construct
  source 1..23: mol_type = other DNA
  modified_base 1: mod_base = OTHER; note = Vinyl-phosphonate-2'-O-methyluridine-3'-phosphate
  modified_base 3: mod_base = OTHER; note = 2'-O-methyluridine-3'-phosphate
  modified_base 4: mod_base = OTHER; note = 2'-O-methyladenosine-3'-phosphate
  modified_base 6: mod_base = OTHER; note = 2'-O-methyluridine-3'-phosphate
  modified_base 8: mod_base = OTHER; note = 2'-O-methyladenosine-3'-phosphate
  modified_base 9: mod_base = OTHER; note = 2'-O-methyluridine-3'-phosphate
  modified_base 10: mod_base = OTHER; note = 2'-O-methyluridine-3'-phosphate
  modified_base 11: mod_base = OTHER; note = 2'-O-methylguanosine-3'-phosphate
  modified_base 13: mod_base = OTHER; note = 2'-O-methyladenosine-3'-phosphate
  modified_base 14: mod_base = OTHER; note = 2'-fluoroadenosine-3'-phosphate
  modified_base 15: mod_base = OTHER; note = 2'-O-methylguanosine-3'-phosphate
  modified_base 16: mod_base = OTHER; note = 2'-O-methyluridine-3'-phosphate
  modified_base 17: mod_base = OTHER; note = 2'-O-methylguanosine-3'-phosphate
  modified_base 18: mod_base = OTHER; note = 2'-O-methyladenosine-3'-phosphate
  modified_base 19: mod_base = OTHER; note = 2'-O-methylguanosine-3'-phosphate
  modified_base 20: mod_base = OTHER; note = 2'-O-methylguanosine-3'-phosphate
  modified_base 21: mod_base = OTHER; note = 2'-O-methyluridine-3'-phosphorothioate
  modified_base 22: mod_base = OTHER; note = 2'-O-methyluridine-3'-phosphorothioate
  modified_base 23: mod_base = OTHER; note = 2'-O-methyladenosine-3'-phosphate
  misc_feature 1: note = RNA
  misc_feature 2: note = DNA
  misc_feature 3..4: note = RNA
  misc_feature 5: note = DNA
  misc_feature 6: note = RNA
  misc_feature 7: note = DNA
  misc_feature 8..11: note = RNA
  misc_feature 12: note = DNA
  misc_feature 13..23: note = RNA
tataattattgcaagtgaggtta

SEQ ID NO: 1079 - DNA, 23 bp, synthetic construct
  source 1..23: mol_type = other DNA
  modified_base 1: mod_base = OTHER; note = Vinyl-phosphonate-2'-O-methyluridine-3'-phosphate
  modified_base 3: mod_base = OTHER; note = 2'-O-methyladenosine-3'-phosphate
  modified_base 4: mod_base = OTHER; note = 2'-O-methyluridine-3'-phosphate
  modified_base 6: mod_base = OTHER; note = 2'-O-methyladenosine-3'-phosphate
  modified_base 8: mod_base = OTHER; note = 2'-O-methyluridine-3'-phosphate
  modified_base 9: mod_base = OTHER; note = 2'-O-methyladenosine-3'-phosphate
  modified_base 10: mod_base = OTHER; note = 2'-O-methyluridine-3'-phosphate
  modified_base 11: mod_base = OTHER; note = 2'-O-methyluridine-3'-phosphate
  modified_base 13: mod_base = OTHER; note = 2'-O-methylcytidine-3'-phosphate
  modified_base 14: mod_base = OTHER; note = 2'-fluoroadenosine-3'-phosphate
  modified_base 15: mod_base = OTHER; note = 2'-O-methyladenosine-3'-phosphate
  modified_base 16: mod_base = OTHER; note = 2'-O-methylguanosine-3'-phosphate
  modified_base 17: mod_base = OTHER; note = 2'-O-methyluridine-3'-phosphate
  modified_base 18: mod_base = OTHER; note = 2'-O-methylguanosine-3'-phosphate
  modified_base 19: mod_base = OTHER; note = 2'-O-methyladenosine-3'-phosphate
  modified_base 20: mod_base = OTHER; note = 2'-O-methylguanosine-3'-phosphate
  modified_base 21: mod_base = OTHER; note = 2'-O-methylguanosine-3'-phosphorothioate
  modified_base 22: mod_base = OTHER; note = 2'-O-methyluridine-3'-phosphorothioate
  modified_base 23: mod_base = OTHER; note = 2'-O-methyluridine-3'-phosphate
  misc_feature 1: note = RNA
  misc_feature 2: note = DNA
  misc_feature 3..4: note = RNA
  misc_feature 5: note = DNA
  misc_feature 6: note = RNA
  misc_feature 7: note = DNA
  misc_feature 8..11: note = RNA
  misc_feature 12: note = DNA
  misc_feature 13..23: note = RNA
ttataattattgcaagtgaggtt

SEQ ID NO: 1080 - DNA, 23 bp, synthetic construct
  source 1..23: mol_type = other DNA
  modified_base 1: mod_base = OTHER; note = Vinyl-phosphonate-2'-O-methyluridine-3'-phosphate
  modified_base 2: mod_base = OTHER; note = 2'-fluorouridine-3'-phosphate
  modified_base 3: mod_base = OTHER; note = 2'-O-methyluridine-3'-phosphate
  modified_base 4: mod_base = OTHER; note = 2'-O-methyladenosine-3'-phosphate
  modified_base 6: mod_base = OTHER; note = 2'-O-methyladenosine-3'-phosphate
  modified_base 7: mod_base = OTHER; note = Adenosine-glycol nucleic acid (GNA)
  modified_base 8: mod_base = OTHER; note = 2'-O-methyluridine-3'-phosphate
  modified_base 9: mod_base = OTHER; note = 2'-O-methyluridine-3'-phosphate
  modified_base 10: mod_base = OTHER; note = 2'-O-methyladenosine-3'-phosphate
  modified_base 11: mod_base = OTHER; note = 2'-O-methyluridine-3'-phosphate
  modified_base 12: mod_base = OTHER; note = 2'-O-methyluridine-3'-phosphate
  modified_base 13: mod_base = OTHER; note = 2'-O-methylguanosine-3'-phosphate
  modified_base 14: mod_base = OTHER; note = 2'-fluorocytidine-3'-phosphate
  modified_base 15: mod_base = OTHER; note = 2'-O-methyladenosine-3'-phosphate
  modified_base 16: mod_base = OTHER; note = 2'-fluoroadenosine-3'-phosphate
  modified_base 17: mod_base = OTHER; note = 2'-O-methylguanosine-3'-phosphate
  modified_base 18: mod_base = OTHER; note = 2'-O-methyluridine-3'-phosphate
  modified_base 19: mod_base = OTHER; note = 2'-O-methylguanosine-3'-phosphate
  modified_base 20: mod_base = OTHER; note = 2'-O-methyladenosine-3'-phosphate
  modified_base 21: mod_base = OTHER; note = 2'-O-methylguanosine-3'-phosphorothioate
  modified_base 22: mod_base = OTHER; note = 2'-O-methylguanosine-3'-phosphorothioate
  modified_base 23: mod_base = OTHER; note = 2'-O-methyluridine-3'-phosphate
  misc_feature 1..4: note = RNA
  misc_feature 5: note = DNA
  misc_feature 6..23: note = RNA
tttataattattgcaagtgaggt

SEQ ID NO: 1081 - DNA, 23 bp, synthetic construct
  source 1..23: mol_type = other DNA
  modified_base 1: mod_base = OTHER; note = Vinyl-phosphonate-2'-O-methyluridine-3'-phosphate
  modified_base 3: mod_base = OTHER; note = 2'-O-methyluridine-3'-phosphate
  modified_base 4: mod_base = OTHER; note = 2'-O-methyladenosine-3'-phosphate
  modified_base 6: mod_base = OTHER; note = 2'-O-methyladenosine-3'-phosphate
  modified_base 8: mod_base = OTHER; note = 2'-O-methyluridine-3'-phosphate
  modified_base 9: mod_base = OTHER; note = 2'-O-methyluridine-3'-phosphate
  modified_base 10: mod_base = OTHER; note = 2'-O-methyladenosine-3'-phosphate
  modified_base 11: mod_base = OTHER; note = 2'-O-methyluridine-3'-phosphate
  modified_base 13: mod_base = OTHER; note = 2'-O-methylguanosine-3'-phosphate
  modified_base 14: mod_base = OTHER; note = 2'-fluorocytidine-3'-phosphate
  modified_base 15: mod_base = OTHER; note = 2'-O-methyladenosine-3'-phosphate
  modified_base 16: mod_base = OTHER; note = 2'-O-methyladenosine-3'-phosphate
  modified_base 17: mod_base = OTHER; note = 2'-O-methylguanosine-3'-phosphate
  modified_base 18: mod_base = OTHER; note = 2'-O-methyluridine-3'-phosphate
  modified_base 19: mod_base = OTHER; note = 2'-O-methylguanosine-3'-phosphate
  modified_base 20: mod_base = OTHER; note = 2'-O-methyladenosine-3'-phosphate
  modified_base 21: mod_base = OTHER; note = 2'-O-methylguanosine-3'-phosphorothioate
  modified_base 22: mod_base = OTHER; note = 2'-O-methylguanosine-3'-phosphorothioate
  modified_base 23: mod_base = OTHER; note = 2'-O-methyluridine-3'-phosphate
  misc_feature 1: note = RNA
  misc_feature 2: note = DNA
  misc_feature 3..4: note = RNA
  misc_feature 5: note = DNA
  misc_feature 6: note = RNA
  misc_feature 7: note = DNA
  misc_feature 8..11: note = RNA
  misc_feature 12: note = DNA
  misc_feature 13..23: note = RNA
tttataattattgcaagtgaggt

SEQ ID NO: 1082 - DNA, 23 bp, synthetic construct
  source 1..23: mol_type = other DNA
  modified_base 1: mod_base = OTHER; note = Vinyl-phosphonate-2'-O-methyluridine-3'-phosphate
  modified_base 3: mod_base = OTHER; note = 2'-O-methyluridine-3'-phosphate
  modified_base 4: mod_base = OTHER; note = 2'-O-methyluridine-3'-phosphate
  modified_base 6: mod_base = OTHER; note = 2'-O-methyluridine-3'-phosphate
  modified_base 8: mod_base = OTHER; note = 2'-O-methyladenosine-3'-phosphate
  modified_base 9: mod_base = OTHER; note = 2'-O-methyluridine-3'-phosphate
  modified_base 10: mod_base = OTHER; note = 2'-O-methyluridine-3'-phosphate
  modified_base 11: mod_base = OTHER; note = 2'-O-methyladenosine-3'-phosphate
  modified_base 13: mod_base = OTHER; note = 2'-O-methyluridine-3'-phosphate
  modified_base 14: mod_base = OTHER; note = 2'-fluoroguanosine-3'-phosphate
  modified_base 15: mod_base = OTHER; note = 2'-O-methylcytidine-3'-phosphate
  modified_base 16: mod_base = OTHER; note = 2'-O-methyladenosine-3'-phosphate
  modified_base 17: mod_base = OTHER; note = 2'-O-methyladenosine-3'-phosphate
  modified_base 18: mod_base = OTHER; note = 2'-O-methylguanosine-3'-phosphate
  modified_base 19: mod_base = OTHER; note = 2'-O-methyluridine-3'-phosphate
  modified_base 20: mod_base = OTHER; note = 2'-O-methylguanosine-3'-phosphate
  modified_base 21: mod_base = OTHER; note = 2'-O-methyladenosine-3'-phosphorothioate
  modified_base 22: mod_base = OTHER; note = 2'-O-methylguanosine-3'-phosphorothioate
  modified_base 23: mod_base = OTHER; note = 2'-O-methylguanosine-3'-phosphate
  misc_feature 1: note = RNA
  misc_feature 2: note = DNA
  misc_feature 3..4: note = RNA
  misc_feature 5: note = DNA
  misc_feature 6: note = RNA
  misc_feature 7: note = DNA
  misc_feature 8..11: note = RNA
  misc_feature 12: note = DNA
  misc_feature 13..23: note = RNA
tcttataattattgcaagtgagg

SEQ ID NO: 1083 - DNA, 23 bp, synthetic construct
  source 1..23: mol_type = other DNA
  modified_base 1: mod_base = OTHER; note = Vinyl-phosphonate-2'-O-methyluridine-3'-phosphate
  modified_base 3: mod_base = OTHER; note = 2'-O-methylcytidine-3'-phosphate
  modified_base 4: mod_base = OTHER; note = 2'-O-methyluridine-3'-phosphate
  modified_base 6: mod_base = OTHER; note = 2'-O-methyladenosine-3'-phosphate
  modified_base 8: mod_base = OTHER; note = 2'-O-methyladenosine-3'-phosphate
  modified_base 9: mod_base = OTHER; note = 2'-O-methyladenosine-3'-phosphate
  modified_base 10: mod_base = OTHER; note = 2'-O-methyluridine-3'-phosphate
  modified_base 11: mod_base = OTHER; note = 2'-O-methyluridine-3'-phosphate
  modified_base 13: mod_base = OTHER; note = 2'-O-methyluridine-3'-phosphate
  modified_base 14: mod_base = OTHER; note = 2'-fluorouridine-3'-phosphate
  modified_base 15: mod_base = OTHER; note = 2'-O-methylguanosine-3'-phosphate
  modified_base 16: mod_base = OTHER; note = 2'-O-methylcytidine-3'-phosphate
  modified_base 17: mod_base = OTHER; note = 2'-O-methyladenosine-3'-phosphate
  modified_base 18: mod_base = OTHER; note = 2'-O-methyladenosine-3'-phosphate
  modified_base 19: mod_base = OTHER; note = 2'-O-methylguanosine-3'-phosphate
  modified_base 20: mod_base = OTHER; note = 2'-O-methyluridine-3'-phosphate
  modified_base 21: mod_base = OTHER; note = 2'-O-methylguanosine-3'-phosphorothioate
  modified_base 22: mod_base = OTHER; note = 2'-O-methyladenosine-3'-phosphorothioate
  modified_base 23: mod_base = OTHER; note = 2'-O-methylguanosine-3'-phosphate
  misc_feature 1: note = RNA
  misc_feature 2: note = DNA
  misc_feature 3..4: note = RNA
  misc_feature 5: note = DNA
  misc_feature 6: note = RNA
  misc_feature 7: note = DNA
  misc_feature 8..11: note = RNA
  misc_feature 12: note = DNA
  misc_feature 13..23: note = RNA
ttcttataattattgcaagtgag

SEQ ID NO: 1084 - DNA, 23 bp, synthetic construct
  source 1..23: mol_type = other DNA
  modified_base 1: mod_base = OTHER; note = Vinyl-phosphonate-2'-O-methyluridine-3'-phosphate
  modified_base 2: mod_base = OTHER; note = 2'-fluoroguanosine-3'-phosphate
  modified_base 3: mod_base = OTHER; note = 2'-O-methylcytidine-3'-phosphate
  modified_base 4: mod_base = OTHER; note = 2'-O-methylcytidine-3'-phosphate
  modified_base 6: mod_base = OTHER; note = 2'-O-methylcytidine-3'-phosphate
  modified_base 7: mod_base = OTHER; note = Thymidine-glycol nucleic acid (GNA) S-Isomer
  modified_base 8: mod_base = OTHER; note = 2'-O-methyladenosine-3'-phosphate
  modified_base 9: mod_base = OTHER; note = 2'-O-methyluridine-3'-phosphate
  modified_base 10: mod_base = OTHER; note = 2'-O-methyladenosine-3'-phosphate
  modified_base 11: mod_base = OTHER; note = 2'-O-methylcytidine-3'-phosphate
  modified_base 12: mod_base = OTHER; note = 2'-O-methylcytidine-3'-phosphate
  modified_base 13: mod_base = OTHER; note = 2'-O-methyladenosine-3'-phosphate
  modified_base 14: mod_base = OTHER; note = 2'-fluorocytidine-3'-phosphate
  modified_base 15: mod_base = OTHER; note = 2'-O-methylcytidine-3'-phosphate
  modified_base 16: mod_base = OTHER; note = 2'-fluorocytidine-3'-phosphate
  modified_base 17: mod_base = OTHER; note = 2'-O-methyladenosine-3'-phosphate
  modified_base 18: mod_base = OTHER; note = 2'-O-methylcytidine-3'-phosphate
  modified_base 19: mod_base = OTHER; note = 2'-O-methyluridine-3'-phosphate
  modified_base 20: mod_base = OTHER; note = 2'-O-methyluridine-3'-phosphate
  modified_base 21: mod_base = OTHER; note = 2'-O-methylguanosine-3'-phosphorothioate
  modified_base 22: mod_base = OTHER; note = 2'-O-methylguanosine-3'-phosphorothioate
  modified_base 23: mod_base = OTHER; note = 2'-O-methylcytidine-3'-phosphate
  misc_feature 1..4: note = RNA
  misc_feature 5: note = DNA
  misc_feature 6: note = RNA
  misc_feature 7: note = DNA
  misc_feature 8..23: note = RNA
tgcctctataccacccacttggc

SEQ ID NO: 1085 - DNA, 23 bp, synthetic construct
  source 1..23: mol_type = other DNA
  modified_base 1: mod_base = OTHER; note = Vinyl-phosphonate-2'-O-methyluridine-3'-phosphate
  modified_base 2: mod_base = OTHER; note = 2'-fluoroadenosine-3'-phosphate
  modified_base 3: mod_base = OTHER; note = 2'-O-methylguanosine-3'-phosphate
  modified_base 4: mod_base = OTHER; note = 2'-O-methylguanosine-3'-phosphate
  modified_base 6: mod_base = OTHER; note = 2'-O-methylcytidine-3'-phosphate
  modified_base 7: mod_base = OTHER; note = Adenosine-glycol nucleic acid (GNA)
  modified_base 8: mod_base = OTHER; note = 2'-O-methylguanosine-3'-phosphate
  modified_base 9: mod_base = OTHER; note = 2'-O-methyluridine-3'-phosphate
  modified_base 10: mod_base = OTHER; note = 2'-O-methyladenosine-3'-phosphate
  modified_base 11: mod_base = OTHER; note = 2'-O-methylcytidine-3'-phosphate
  modified_base 12: mod_base = OTHER; note = 2'-O-methylguanosine-3'-phosphate
  modified_base 13: mod_base = OTHER; note = 2'-O-methylcytidine-3'-phosphate
  modified_base 14: mod_base = OTHER; note = 2'-fluoroadenosine-3'-phosphate
  modified_base 15: mod_base = OTHER; note = 2'-O-methylcytidine-3'-phosphate
  modified_base 16: mod_base = OTHER; note = 2'-fluoroadenosine-3'-phosphate
  modified_base 17: mod_base = OTHER; note = 2'-O-methyladenosine-3'-phosphate
  modified_base 18: mod_base = OTHER; note = 2'-O-methylguanosine-3'-phosphate
  modified_base 19: mod_base = OTHER; note = 2'-O-methyladenosine-3'-phosphate
  modified_base 20: mod_base = OTHER; note = 2'-O-methylguanosine-3'-phosphate
  modified_base 21: mod_base = OTHER; note = 2'-O-methylcytidine-3'-phosphorothioate
  modified_base 22: mod_base = OTHER; note = 2'-O-methylcytidine-3'-phosphorothioate
  modified_base 23: mod_base = OTHER; note = 2'-O-methyluridine-3'-phosphate
  misc_feature 1..4: note = RNA
  misc_feature 5: note = DNA
  misc_feature 6..23: note = RNA
taggacagtacgcacaagagcct

SEQ ID NO: 1086 - DNA, 23 bp, synthetic construct
  source 1..23: mol_type = other DNA
  modified_base 1: mod_base = OTHER; note = Vinyl-phosphonate-2'-O-methyluridine-3'-phosphate
  modified_base 3: mod_base = OTHER; note = 2'-O-methylguanosine-3'-phosphate
  modified_base 4: mod_base = OTHER; note = 2'-O-methyladenosine-3'-phosphate
  modified_base 6: mod_base = OTHER; note = 2'-O-methylguanosine-3'-phosphate
  modified_base 8: mod_base = OTHER; note = 2'-O-methylguanosine-3'-phosphate
  modified_base 9: mod_base = OTHER; note = 2'-O-methylcytidine-3'-phosphate
  modified_base 10: mod_base = OTHER; note = 2'-O-methyladenosine-3'-phosphate
  modified_base 11: mod_base = OTHER; note = 2'-O-methylcytidine-3'-phosphate
  modified_base 13: mod_base = OTHER; note = 2'-O-methylguanosine-3'-phosphate
  modified_base 14: mod_base = OTHER; note = 2'-fluoroadenosine-3'-phosphate
  modified_base 15: mod_base = OTHER; note = 2'-O-methyluridine-3'-phosphate
  modified_base 16: mod_base = OTHER; note = 2'-O-methylguanosine-3'-phosphate
  modified_base 17: mod_base = OTHER; note = 2'-O-methylguanosine-3'-phosphate
  modified_base 18: mod_base = OTHER; note = 2'-O-methylcytidine-3'-phosphate
  modified_base 19: mod_base = OTHER; note = 2'-O-methyladenosine-3'-phosphate
  modified_base 20: mod_base = OTHER; note = 2'-O-methylguanosine-3'-phosphate
  modified_base 21: mod_base = OTHER; note = 2'-O-methylguanosine-3'-phosphorothioate
  modified_base 22: mod_base = OTHER; note = 2'-O-methylcytidine-3'-phosphorothioate
  modified_base 23: mod_base = OTHER; note = 2'-O-methyluridine-3'-phosphate
  misc_feature 1: note = RNA
  misc_feature 2: note = DNA
  misc_feature 3..4: note = RNA
  misc_feature 5: note = DNA
  misc_feature 6: note = RNA
  misc_feature 7: note = DNA
  misc_feature 8..11: note = RNA
  misc_feature 12: note = DNA
  misc_feature 13..23: note = RNA
tcgaagagcacagatggcaggct

SEQ ID NO: 1087 - DNA, 23 bp, synthetic construct
  source 1..23: mol_type = other DNA
  modified_base 1: mod_base = OTHER; note = Vinyl-phosphonate-2'-O-methyluridine-3'-phosphate
  modified_base 3: mod_base = OTHER; note = 2'-O-methylcytidine-3'-phosphate
  modified_base 4: mod_base = OTHER; note = 2'-O-methylguanosine-3'-phosphate
  modified_base 6: mod_base = OTHER; note = 2'-O-methyladenosine-3'-phosphate
  modified_base 8: mod_base = OTHER; note = 2'-O-methyladenosine-3'-phosphate
  modified_base 9: mod_base = OTHER; note = 2'-O-methylguanosine-3'-phosphate
  modified_base 10: mod_base = OTHER; note = 2'-O-methylcytidine-3'-phosphate
  modified_base 11: mod_base = OTHER; note = 2'-O-methyladenosine-3'-phosphate
  modified_base 13: mod_base = OTHER; note = 2'-O-methyladenosine-3'-phosphate
  modified_base 14: mod_base = OTHER; note = 2'-fluoroguanosine-3'-phosphate
  modified_base 15: mod_base = OTHER; note = 2'-O-methyladenosine-3'-phosphate
  modified_base 16: mod_base = OTHER; note = 2'-O-methyluridine-3'-phosphate
  modified_base 17: mod_base = OTHER; note = 2'-O-methylguanosine-3'-phosphate
  modified_base 18: mod_base = OTHER; note = 2'-O-methylguanosine-3'-phosphate
  modified_base 19: mod_base = OTHER; note = 2'-O-methylcytidine-3'-phosphate
  modified_base 20: mod_base = OTHER; note = 2'-O-methyladenosine-3'-phosphate
  modified_base 21: mod_base = OTHER; note = 2'-O-methylguanosine-3'-phosphorothioate
  modified_base 22: mod_base = OTHER; note = 2'-O-methylguanosine-3'-phosphorothioate
  modified_base 23: mod_base = OTHER; note = 2'-O-methylcytidine-3'-phosphate
  misc_feature 1: note = RNA
  misc_feature 2: note = DNA
  misc_feature 3..4: note = RNA
  misc_feature 5: note = DNA
  misc_feature 6: note = RNA
  misc_feature 7: note = DNA
  misc_feature 8..11: note = RNA
  misc_feature 12: note = DNA
  misc_feature 13..23: note = RNA
tacgaagagcacagatggcaggc

SEQ ID NO: 1088 - DNA, 23 bp, synthetic construct
  source 1..23: mol_type = other DNA
  modified_base 1: mod_base = OTHER; note = Vinyl-phosphonate-2'-O-methyluridine-3'-phosphate
  modified_base 3: mod_base = OTHER; note = 2'-O-methyladenosine-3'-phosphate
  modified_base 4: mod_base = OTHER; note = 2'-O-methylcytidine-3'-phosphate
  modified_base 6: mod_base = OTHER; note = 2'-O-methyladenosine-3'-phosphate
  modified_base 8: mod_base = OTHER; note = 2'-O-methylguanosine-3'-phosphate
  modified_base 9: mod_base = OTHER; note = 2'-O-methyladenosine-3'-phosphate
  modified_base 10: mod_base = OTHER; note = 2'-O-methylguanosine-3'-phosphate
  modified_base 11: mod_base = OTHER; note = 2'-O-methylcytidine-3'-phosphate
  modified_base 13: mod_base = OTHER; note = 2'-O-methylcytidine-3'-phosphate
  modified_base 14: mod_base = OTHER; note = 2'-fluoroadenosine-3'-phosphate
  modified_base 15: mod_base = OTHER; note = 2'-O-methylguanosine-3'-phosphate
  modified_base 16: mod_base = OTHER; note = 2'-O-methyladenosine-3'-phosphate
  modified_base 17: mod_base = OTHER; note = 2'-O-methyluridine-3'-phosphate
  modified_base 18: mod_base = OTHER; note = 2'-O-methylguanosine-3'-phosphate
  modified_base 19: mod_base = OTHER; note = 2'-O-methylguanosine-3'-phosphate
  modified_base 20: mod_base = OTHER; note = 2'-O-methylcytidine-3'-phosphate
  modified_base 21: mod_base = OTHER; note = 2'-O-methyladenosine-3'-phosphorothioate
  modified_base 22: mod_base = OTHER; note = 2'-O-methylguanosine-3'-phosphorothioate
  modified_base 23: mod_base = OTHER; note = 2'-O-methylguanosine-3'-phosphate
  misc_feature 1: note = RNA
  misc_feature 2: note = DNA
  misc_feature 3..4: note = RNA
  misc_feature 5: note = DNA
  misc_feature 6: note = RNA
  misc_feature 7: note = DNA
  misc_feature 8..11: note = RNA
  misc_feature 12: note = DNA
  misc_feature 13..23: note = RNA
tgacgaagagcacagatggcagg

SEQ ID NO: 1089 - DNA, 23 bp, synthetic construct
  source 1..23: mol_type = other DNA
  modified_base 1: mod_base = OTHER; note = Vinyl-phosphonate-2'-O-methyluridine-3'-phosphate
  modified_base 3: mod_base = OTHER; note = 2'-O-methylguanosine-3'-phosphate
  modified_base 4: mod_base = OTHER; note = 2'-O-methyladenosine-3'-phosphate
  modified_base 6: mod_base = OTHER; note = 2'-O-methylguanosine-3'-phosphate
  modified_base 8: mod_base = OTHER; note = 2'-O-methyladenosine-3'-phosphate
  modified_base 9: mod_base = OTHER; note = 2'-O-methylguanosine-3'-phosphate
  modified_base 10: mod_base = OTHER; note = 2'-O-methyladenosine-3'-phosphate
  modified_base 11: mod_base = OTHER; note = 2'-O-methylguanosine-3'-phosphate
  modified_base 13: mod_base = OTHER; note = 2'-O-methyladenosine-3'-phosphate
  modified_base 14: mod_base = OTHER; note = 2'-fluorocytidine-3'-phosphate
  modified_base 15: mod_base = OTHER; note = 2'-O-methyladenosine-3'-phosphate
  modified_base 16: mod_base = OTHER; note = 2'-O-methylguanosine-3'-phosphate
  modified_base 17: mod_base = OTHER; note = 2'-O-methyladenosine-3'-phosphate
  modified_base 18: mod_base = OTHER; note = 2'-O-methyluridine-3'-phosphate
  modified_base 19: mod_base = OTHER; note = 2'-O-methylguanosine-3'-phosphate
  modified_base 20: mod_base = OTHER; note = 2'-O-methylguanosine-3'-phosphate
  modified_base 21: mod_base = OTHER; note = 2'-O-methylcytidine-3'-phosphorothioate
  modified_base 22: mod_base = OTHER; note = 2'-O-methyladenosine-3'-phosphorothioate
  modified_base 23: mod_base = OTHER; note = 2'-O-methylguanosine-3'-phosphate
  misc_feature 1: note = RNA
  misc_feature 2: note = DNA
  misc_feature 3..4: note = RNA
  misc_feature 5: note = DNA
  misc_feature 6: note = RNA
  misc_feature 7: note = DNA
  misc_feature 8..11: note = RNA
  misc_feature 12: note = DNA
  misc_feature 13..23: note = RNA
ttgacgaagagcacagatggcag

SEQ ID NO: 1090 - DNA, 23 bp, synthetic construct
  source 1..23: mol_type = other DNA
  modified_base 1: mod_base = OTHER; note = Vinyl-phosphonate-2'-O-methyluridine-3'-phosphate
  modified_base 3: mod_base = OTHER; note = 2'-O-methyluridine-3'-phosphate
  modified_base 4: mod_base = OTHER; note = 2'-O-methylguanosine-3'-phosphate
  modified_base 6: mod_base = OTHER; note = 2'-O-methylcytidine-3'-phosphate
  modified_base 8: mod_base = OTHER; note = 2'-O-methyladenosine-3'-phosphate
  modified_base 9: mod_base = OTHER; note = 2'-O-methyladenosine-3'-phosphate
  modified_base 10: mod_base = OTHER; note = 2'-O-methylguanosine-3'-phosphate
  modified_base 11: mod_base = OTHER; note = 2'-O-methyladenosine-3'-phosphate
  modified_base 13: mod_base = OTHER; note = 2'-O-methylcytidine-3'-phosphate
  modified_base 14: mod_base = OTHER; note = 2'-fluoroadenosine-3'-phosphate
  modified_base 15: mod_base = OTHER; note = 2'-O-methylcytidine-3'-phosphate
  modified_base 16: mod_base = OTHER; note = 2'-O-methyladenosine-3'-phosphate
  modified_base 17: mod_base = OTHER; note = 2'-O-methylguanosine-3'-phosphate
  modified_base 18: mod_base = OTHER; note = 2'-O-methyladenosine-3'-phosphate
  modified_base 19: mod_base = OTHER; note = 2'-O-methyluridine-3'-phosphate
  modified_base 20: mod_base = OTHER; note = 2'-O-methylguanosine-3'-phosphate
  modified_base 21: mod_base = OTHER; note = 2'-O-methylguanosine-3'-phosphorothioate
  modified_base 22: mod_base = OTHER; note = 2'-O-methylcytidine-3'-phosphorothioate
  modified_base 23: mod_base = OTHER; note = 2'-O-methyladenosine-3'-phosphate
  misc_feature 1: note = RNA
  misc_feature 2: note = DNA
  misc_feature 3..4: note = RNA
  misc_feature 5: note = DNA
  misc_feature 6: note = RNA
  misc_feature 7: note = DNA
  misc_feature 8..11: note = RNA
  misc_feature 12: note = DNA
  misc_feature 13..23: note = RNA
tatgacgaagagcacagatggca

SEQ ID NO: 1091 - DNA, 23 bp, synthetic construct
  source 1..23: mol_type = other DNA
  modified_base 1: mod_base = OTHER; note = Vinyl-phosphonate-2'-O-methyluridine-3'-phosphate
  modified_base 2: mod_base = OTHER; note = 2'-fluoroadenosine-3'-phosphate
  modified_base 3: mod_base = OTHER; note = 2'-O-methylguanosine-3'-phosphate
  modified_base 4: mod_base = OTHER; note = 2'-O-methyladenosine-3'-phosphate
  modified_base 6: mod_base = OTHER; note = 2'-O-methylguanosine-3'-phosphate
  modified_base 7: mod_base = OTHER; note = Adenosine-glycol nucleic acid (GNA)
  modified_base 8: mod_base = OTHER; note = 2'-O-methylcytidine-3'-phosphate
  modified_base 9: mod_base = OTHER; note = 2'-O-methylguanosine-3'-phosphate
  modified_base 10: mod_base = OTHER; note = 2'-O-methyladenosine-3'-phosphate
  modified_base 11: mod_base = OTHER; note = 2'-O-methyladenosine-3'-phosphate
  modified_base 12: mod_base = OTHER; note = 2'-O-methylguanosine-3'-phosphate
  modified_base 13: mod_base = OTHER; note = 2'-O-methyladenosine-3'-phosphate
  modified_base 14: mod_base = OTHER; note = 2'-fluoroguanosine-3'-phosphate
  modified_base 15: mod_base = OTHER; note = 2'-O-methylcytidine-3'-phosphate
  modified_base 16: mod_base = OTHER; note = 2'-fluoroadenosine-3'-phosphate
  modified_base 17: mod_base = OTHER; note = 2'-O-methylcytidine-3'-phosphate
  modified_base 18: mod_base = OTHER; note = 2'-O-methyladenosine-3'-phosphate
  modified_base 19: mod_base = OTHER; note = 2'-O-methylguanosine-3'-phosphate
  modified_base 20: mod_base = OTHER; note = 2'-O-methyladenosine-3'-phosphate
  modified_base 21: mod_base = OTHER; note = 2'-O-methyluridine-3'-phosphorothioate
  modified_base 22: mod_base = OTHER; note = 2'-O-methylguanosine-3'-phosphorothioate
  modified_base 23: mod_base = OTHER; note = 2'-O-methylguanosine-3'-phosphate
  misc_feature 1..4: note = RNA
  misc_feature 5: note = DNA
  misc_feature 6..23: note = RNA
tagatgacgaagagcacagatgg

SEQ ID NO: 1092 - DNA, 23 bp, synthetic construct
  source 1..23: mol_type = other DNA
  modified_base 1: mod_base = OTHER; note = Vinyl-phosphonate-2'-O-methyluridine-3'-phosphate
  modified_base 3: mod_base = OTHER; note = 2'-O-methyladenosine-3'-phosphate
  modified_base 4: mod_base = OTHER; note = 2'-O-methylguanosine-3'-phosphate
  modified_base 6: mod_base = OTHER; note = 2'-O-methyluridine-3'-phosphate
  modified_base 8: mod_base = OTHER; note = 2'-O-methyladenosine-3'-phosphate
  modified_base 9: mod_base = OTHER; note = 2'-O-methylcytidine-3'-phosphate
  modified_base 10: mod_base = OTHER; note = 2'-O-methylguanosine-3'-phosphate
  modified_base 11: mod_base = OTHER; note = 2'-O-methyladenosine-3'-phosphate
  modified_base 13: mod_base = OTHER; note = 2'-O-methylguanosine-3'-phosphate
  modified_base 14: mod_base = OTHER; note = 2'-fluoroadenosine-3'-phosphate
  modified_base 15: mod_base = OTHER; note = 2'-O-methylguanosine-3'-phosphate
  modified_base 16: mod_base = OTHER; note = 2'-O-methylcytidine-3'-phosphate
  modified_base 17: mod_base = OTHER; note = 2'-O-methyladenosine-3'-phosphate
  modified_base 18: mod_base = OTHER; note = 2'-O-methylcytidine-3'-phosphate
  modified_base 19: mod_base = OTHER; note = 2'-O-methyladenosine-3'-phosphate
  modified_base 20: mod_base = OTHER; note = 2'-O-methylguanosine-3'-phosphate
  modified_base 21: mod_base = OTHER; note = 2'-O-methyladenosine-3'-phosphorothioate
  modified_base 22: mod_base = OTHER; note = 2'-O-methyluridine-3'-phosphorothioate
  modified_base 23: mod_base = OTHER; note = 2'-O-methylguanosine-3'-phosphate
  misc_feature 1: note = RNA
  misc_feature 2: note = DNA
  misc_feature 3..4: note = RNA
  misc_feature 5: note = DNA
  misc_feature 6: note = RNA
  misc_feature 7: note = DNA
  misc_feature 8..11: note = RNA
  misc_feature 12: note = DNA
  misc_feature 13..23: note = RNA
tcagatgacgaagagcacagatg

SEQ ID NO: 1093 - DNA, 23 bp, synthetic construct
  source 1..23: mol_type = other DNA
  modified_base 1: mod_base = OTHER; note = Vinyl-phosphonate-2'-O-methyluridine-3'-phosphate
  modified_base 2: mod_base = OTHER; note = 2'-fluorouridine-3'-phosphate
  modified_base 3: mod_base = OTHER; note = 2'-O-methylcytidine-3'-phosphate
  modified_base 4: mod_base = OTHER; note = 2'-O-methyladenosine-3'-phosphate
  modified_base 6: mod_base = OTHER; note = 2'-O-methyladenosine-3'-phosphate
  modified_base 7: mod_base = OTHER; note = Thymidine-glycol nucleic acid (GNA) S-Isomer
  modified_base 8: mod_base = OTHER; note = 2'-O-methylguanosine-3'-phosphate
  modified_base 9: mod_base = OTHER; note = 2'-O-methyladenosine-3'-phosphate
  modified_base 10: mod_base = OTHER; note = 2'-O-methylcytidine-3'-phosphate
  modified_base 11: mod_base = OTHER; note = 2'-O-methylguanosine-3'-phosphate
  modified_base 12: mod_base = OTHER; note = 2'-O-methyladenosine-3'-phosphate
  modified_base 13: mod_base = OTHER; note = 2'-O-methyladenosine-3'-phosphate
  modified_base 14: mod_base = OTHER; note = 2'-fluoroguanosine-3'-phosphate
  modified_base 15: mod_base = OTHER; note = 2'-O-methyladenosine-3'-phosphate
  modified_base 16: mod_base = OTHER; note = 2'-fluoroguanosine-3'-phosphate
  modified_base 17: mod_base = OTHER; note = 2'-O-methylcytidine-3'-phosphate
  modified_base 18: mod_base = OTHER; note = 2'-O-methyladenosine-3'-phosphate
  modified_base 19: mod_base = OTHER; note = 2'-O-methylcytidine-3'-phosphate
  modified_base 20: mod_base = OTHER; note = 2'-O-methyladenosine-3'-phosphate
  modified_base 21: mod_base = OTHER; note = 2'-O-methylguanosine-3'-phosphorothioate
  modified_base 22: mod_base = OTHER; note = 2'-O-methyladenosine-3'-phosphorothioate
  modified_base 23: mod_base = OTHER; note = 2'-O-methyluridine-3'-phosphate
  misc_feature 1..4: note = RNA
  misc_feature 5: note = DNA
  misc_feature 6: note = RNA
  misc_feature 7: note = DNA
  misc_feature 8..23: note = RNA
ttcagatgacgaagagcacagat

SEQ ID NO: 1094 - DNA, 23 bp, synthetic construct
  source 1..23: mol_type = other DNA
  modified_base 1: mod_base = OTHER; note = Vinyl-phosphonate-2'-O-methyluridine-3'-phosphate
  modified_base 2: mod_base = OTHER; note = 2'-fluoroguanosine-3'-phosphate
  modified_base 3: mod_base = OTHER; note = 2'-O-methyluridine-3'-phosphate
  modified_base 4: mod_base = OTHER; note = 2'-O-methylcytidine-3'-phosphate
  modified_base 6: mod_base = OTHER; note = 2'-O-methylguanosine-3'-phosphate
  modified_base 7: mod_base = OTHER; note = Adenosine-glycol nucleic acid (GNA)
  modified_base 8: mod_base = OTHER; note = 2'-O-methyluridine-3'-phosphate
  modified_base 9: mod_base = OTHER; note = 2'-O-methylguanosine-3'-phosphate
  modified_base 10: mod_base = OTHER; note = 2'-O-methyladenosine-3'-phosphate
  modified_base 11: mod_base = OTHER; note = 2'-O-methylcytidine-3'-phosphate
  modified_base 12: mod_base = OTHER; note = 2'-O-methylguanosine-3'-phosphate
  modified_base 13: mod_base = OTHER; note = 2'-O-methyladenosine-3'-phosphate
  modified_base 14: mod_base = OTHER; note = 2'-fluoroadenosine-3'-phosphate
  modified_base 15: mod_base = OTHER; note = 2'-O-methylguanosine-3'-phosphate
  modified_base 16: mod_base = OTHER; note = 2'-fluoroadenosine-3'-phosphate
  modified_base 17: mod_base = OTHER; note = 2'-O-methylguanosine-3'-phosphate
  modified_base 18: mod_base = OTHER; note = 2'-O-methylcytidine-3'-phosphate
  modified_base 19: mod_base = OTHER; note = 2'-O-methyladenosine-3'-phosphate
  modified_base 20: mod_base = OTHER; note = 2'-O-methylcytidine-3'-phosphate
  modified_base 21: mod_base = OTHER; note = 2'-O-methyladenosine-3'-phosphorothioate
  modified_base 22: mod_base = OTHER; note = 2'-O-methylguanosine-3'-phosphorothioate
  modified_base 23: mod_base = OTHER; note = 2'-O-methyladenosine-3'-phosphate
  misc_feature 1..4: note = RNA
  misc_feature 5: note = DNA
  misc_feature 6..23: note = RNA
tgtcagatgacgaagagcacaga

SEQ ID NO: 1095 - DNA, 23 bp, synthetic construct
  source 1..23: mol_type = other DNA
  modified_base 1: mod_base = OTHER; note = Vinyl-phosphonate-2'-O-methyluridine-3'-phosphate
  modified_base 2: mod_base = OTHER; note = 2'-fluorouridine-3'-phosphate
  modified_base 3: mod_base = OTHER; note = 2'-O-methyladenosine-3'-phosphate
  modified_base 4: mod_base = OTHER; note = 2'-O-methyladenosine-3'-phosphate
  modified_base 6: mod_base = OTHER; note = 2'-O-methylcytidine-3'-phosphate
  modified_base 7: mod_base = OTHER; note = Adenosine-glycol nucleic acid (GNA)
  modified_base 8: mod_base = OTHER; note = 2'-O-methylcytidine-3'-phosphate
  modified_base 9: mod_base = OTHER; note = 2'-O-methyladenosine-3'-phosphate
  modified_base 10: mod_base = OTHER; note = 2'-O-methyladenosine-3'-phosphate
  modified_base 11: mod_base = OTHER; note = 2'-O-methylcytidine-3'-phosphate
  modified_base 12: mod_base = OTHER; note = 2'-O-methyluridine-3'-phosphate
  modified_base 13: mod_base = OTHER; note = 2'-O-methylguanosine-3'-phosphate
  modified_base 14: mod_base = OTHER; note = 2'-fluoroguanosine-3'-phosphate
  modified_base 15: mod_base = OTHER; note = 2'-O-methyluridine-3'-phosphate
  modified_base 16: mod_base = OTHER; note = 2'-fluoroadenosine-3'-phosphate
  modified_base 17: mod_base = OTHER; note = 2'-O-methylguanosine-3'-phosphate
  modified_base 18: mod_base = OTHER; note = 2'-O-methyluridine-3'-phosphate
  modified_base 19: mod_base = OTHER; note = 2'-O-methylcytidine-3'-phosphate
  modified_base 20: mod_base = OTHER; note = 2'-O-methylcytidine-3'-phosphate
  modified_base 21: mod_base = OTHER; note = 2'-O-methyladenosine-3'-phosphorothioate
  modified_base 22: mod_base = OTHER; note = 2'-O-methyluridine-3'-phosphorothioate
  modified_base 23: mod_base = OTHER; note = 2'-O-methyladenosine-3'-phosphate
  misc_feature 1..4: note = RNA
  misc_feature 5: note = DNA
  misc_feature 6..23: note = RNA
ttaaccacaactggtagtccata

SEQ ID NO: 1096 - DNA, 23 bp, synthetic construct
  source 1..23: mol_type = other DNA
  modified_base 1: mod_base = OTHER; note = Vinyl-phosphonate-2'-O-methyluridine-3'-phosphate
  modified_base 3: mod_base = OTHER; note = 2'-O-methyluridine-3'-phosphate
  modified_base 4: mod_base = OTHER; note = 2'-O-methyluridine-3'-phosphate
  modified_base 6: mod_base = OTHER; note = 2'-O-methyladenosine-3'-phosphate
  modified_base 8: mod_base = OTHER; note = 2'-O-methylcytidine-3'-phosphate
  modified_base 9: mod_base = OTHER; note = 2'-O-methyladenosine-3'-phosphate
  modified_base 10: mod_base = OTHER; note = 2'-O-methylcytidine-3'-phosphate
  modified_base 11: mod_base = OTHER; note = 2'-O-methyladenosine-3'-phosphate
  modified_base 13: mod_base = OTHER; note = 2'-O-methylcytidine-3'-phosphate
  modified_base 14: mod_base = OTHER; note = 2'-fluorouridine-3'-phosphate
  modified_base 15: mod_base = OTHER; note = 2'-O-methylguanosine-3'-phosphate
  modified_base 16: mod_base = OTHER; note = 2'-O-methylguanosine-3'-phosphate
  modified_base 17: mod_base = OTHER; note = 2'-O-methyluridine-3'-phosphate
  modified_base 18: mod_base = OTHER; note = 2'-O-methyladenosine-3'-phosphate
  modified_base 19: mod_base = OTHER; note = 2'-O-methylguanosine-3'-phosphate
  modified_base 20: mod_base = OTHER; note = 2'-O-methyluridine-3'-phosphate
  modified_base 21: mod_base = OTHER; note = 2'-O-methylcytidine-3'-phosphorothioate
  modified_base 22: mod_base = OTHER; note = 2'-O-methylcytidine-3'-phosphorothioate
  modified_base 23: mod_base = OTHER; note = 2'-O-methyladenosine-3'-phosphate
  misc_feature 1: note = RNA
  misc_feature 2: note = DNA
  misc_feature 3..4: note = RNA
  misc_feature 5: note = DNA
  misc_feature 6: note = RNA
  misc_feature 7: note = DNA
  misc_feature 8..11: note = RNA
  misc_feature 12: note = DNA
  misc_feature 13..23: note = RNA
tcttaaccacaactggtagtcca

SEQ ID NO: 1097 - DNA, 23 bp, synthetic construct
  source 1..23: mol_type = other DNA
  modified_base 1: mod_base = OTHER; note = Vinyl-phosphonate-2'-O-methyluridine-3'-phosphate
  modified_base 2: mod_base = OTHER; note = 2'-fluoroguanosine-3'-phosphate
  modified_base 3: mod_base = OTHER; note = 2'-O-methylguanosine-3'-phosphate
  modified_base 4: mod_base = OTHER; note = 2'-O-methyluridine-3'-phosphate
  modified_base 6: mod_base = OTHER; note = 2'-O-methyluridine-3'-phosphate
  modified_base 7: mod_base = OTHER; note = Adenosine-glycol nucleic acid (GNA)
  modified_base 8: mod_base = OTHER; note = 2'-O-methyladenosine-3'-phosphate
  modified_base 9: mod_base = OTHER; note = 2'-O-methylguanosine-3'-phosphate
  modified_base 10: mod_base = OTHER; note = 2'-O-methyladenosine-3'-phosphate
  modified_base 11: mod_base = OTHER; note = 2'-O-methylguanosine-3'-phosphate
  modified_base 12: mod_base = OTHER; note = 2'-O-methylcytidine-3'-phosphate
  modified_base 13: mod_base = OTHER; note = 2'-O-methyluridine-3'-phosphate
  modified_base 14: mod_base = OTHER; note = 2'-fluorouridine-3'-phosphate
  modified_base 15: mod_base = OTHER; note = 2'-O-methyladenosine-3'-phosphate
  modified_base 16: mod_base = OTHER; note = 2'-fluoroadenosine-3'-phosphate
  modified_base 17: mod_base = OTHER; note = 2'-O-methylcytidine-3'-phosphate
  modified_base 18: mod_base = OTHER; note = 2'-O-methylcytidine-3'-phosphate
  modified_base 19: mod_base = OTHER; note = 2'-O-methyladenosine-3'-phosphate
  modified_base 20: mod_base = OTHER; note = 2'-O-methylcytidine-3'-phosphate
  modified_base 21: mod_base = OTHER; note = 2'-O-methyladenosine-3'-phosphorothioate
  modified_base 22: mod_base = OTHER; note = 2'-O-methyladenosine-3'-phosphorothioate
  modified_base 23: mod_base = OTHER; note = 2'-O-methylcytidine-3'-phosphate
  misc_feature 1..4: note = RNA
  misc_feature 5: note = DNA
  misc_feature 6..23: note = RNA
tggtgtaagagcttaaccacaac

SEQ ID NO: 1098 - DNA, 23 bp, synthetic construct
  source 1..23: mol_type = other DNA
  modified_base 1: mod_base = OTHER; note = Vinyl-phosphonate-2'-O-methyluridine-3'-phosphate
  modified_base 3: mod_base = OTHER; note = 2'-O-methyluridine-3'-phosphate
  modified_base 4: mod_base = OTHER; note = 2'-O-methylcytidine-3'-phosphate
  modified_base 6: mod_base = OTHER; note = 2'-O-methyladenosine-3'-phosphate
  modified_base 8: mod_base = OTHER; note = 2'-O-methylcytidine-3'-phosphate
  modified_base 9: mod_base = OTHER; note = 2'-O-methyladenosine-3'-phosphate
  modified_base 10: mod_base = OTHER; note = 2'-O-methylguanosine-3'-phosphate
  modified_base 11: mod_base = OTHER; note = 2'-O-methyluridine-3'-phosphate
  modified_base 13: mod_base = OTHER; note = 2'-O-methylguanosine-3'-phosphate
  modified_base 14: mod_base = OTHER; note = 2'-fluorocytidine-3'-phosphate
  modified_base 15: mod_base = OTHER; note = 2'-O-methylcytidine-3'-phosphate
  modified_base 16: mod_base = OTHER; note = 2'-O-methyluridine-3'-phosphate
  modified_base 17: mod_base = OTHER; note = 2'-O-methyluridine-3'-phosphate
  modified_base 18: mod_base = OTHER; note = 2'-O-methyluridine-3'-phosphate
  modified_base 19: mod_base = OTHER; note = 2'-O-methyladenosine-3'-phosphate
  modified_base 20: mod_base = OTHER; note = 2'-O-methyluridine-3'-phosphate
  modified_base 21: mod_base = OTHER; note = 2'-O-methylcytidine-3'-phosphorothioate
  modified_base 22: mod_base = OTHER; note = 2'-O-methyladenosine-3'-phosphorothioate
  modified_base 23: mod_base = OTHER; note = 2'-O-methylguanosine-3'-phosphate
  misc_feature 1: note = RNA
  misc_feature 2: note = DNA
  misc_feature 3..4: note = RNA
  misc_feature 5: note = DNA
  misc_feature 6: note = RNA
  misc_feature 7: note = DNA
  misc_feature 8..11: note = RNA
  misc_feature 12: note = DNA
  misc_feature 13..23: note = RNA
tatccaacagtagcctttatcag

SEQ ID NO: 1099 - DNA, 23 bp, synthetic construct
  source 1..23: mol_type = other DNA
  modified_base 1: mod_base = OTHER; note = Vinyl-phosphonate-2'-O-methyluridine-3'-phosphate
  modified_base 2: mod_base = OTHER; note = 2'-fluoroadenosine-3'-phosphate
  modified_base 3: mod_base = OTHER; note = 2'-O-methyladenosine-3'-phosphate
  modified_base 4: mod_base = OTHER; note = 2'-O-methyluridine-3'-phosphate
  modified_base 6: mod_base = OTHER; note = 2'-O-methylcytidine-3'-phosphate
  modified_base 7: mod_base = OTHER; note = Adenosine-glycol nucleic acid (GNA)
  modified_base 8: mod_base = OTHER; note = 2'-O-methyladenosine-3'-phosphate
  modified_base 9: mod_base = OTHER; note = 2'-O-methylcytidine-3'-phosphate
  modified_base 10: mod_base = OTHER; note = 2'-O-methyladenosine-3'-phosphate
  modified_base 11: mod_base = OTHER; note = 2'-O-methylguanosine-3'-phosphate
  modified_base 12: mod_base = OTHER; note = 2'-O-methyluridine-3'-phosphate
  modified_base 13: mod_base = OTHER; note = 2'-O-methyladenosine-3'-phosphate
  modified_base 14: mod_base = OTHER; note = 2'-fluoroguanosine-3'-phosphate
  modified_base 15: mod_base = OTHER; note = 2'-O-methylcytidine-3'-phosphate
  modified_base 16: mod_base = OTHER; note = 2'-fluorocytidine-3'-phosphate
  modified_base 17: mod_base = OTHER; note = 2'-O-methyluridine-3'-phosphate
  modified_base 18: mod_base = OTHER; note = 2'-O-methyluridine-3'-phosphate
  modified_base 19: mod_base = OTHER; note = 2'-O-methyluridine-3'-phosphate
  modified_base 20: mod_base = OTHER; note = 2'-O-methyladenosine-3'-phosphate
  modified_base 21: mod_base = OTHER; note = 2'-O-methyluridine-3'-phosphorothioate
  modified_base 22: mod_base = OTHER; note = 2'-O-methylcytidine-3'-phosphorothioate
  modified_base 23: mod_base = OTHER; note = 2'-O-methyladenosine-3'-phosphate
  misc_feature 1..4: note = RNA
  misc_feature 5: note = DNA
  misc_feature 6..23: note = RNA
taatccaacagtagcctttatca

SEQ ID NO: 1100 - DNA, 23 bp, synthetic construct
  source 1..23: mol_type = other DNA
  modified_base 1: mod_base = OTHER; note = Vinyl-phosphonate-2'-O-methyluridine-3'-phosphate
  modified_base 3: mod_base = OTHER; note = 2'-O-methyladenosine-3'-phosphate
  modified_base 4: mod_base = OTHER; note = 2'-O-methyluridine-3'-phosphate
  modified_base 6: mod_base = OTHER; note = 2'-O-methylcytidine-3'-phosphate
  modified_base 8: mod_base = OTHER; note = 2'-O-methyladenosine-3'-phosphate
  modified_base 9: mod_base = OTHER; note = 2'-O-methylcytidine-3'-phosphate
  modified_base 10: mod_base = OTHER; note = 2'-O-methyladenosine-3'-phosphate
  modified_base 11: mod_base = OTHER; note = 2'-O-methylguanosine-3'-phosphate
  modified_base 13: mod_base = OTHER; note = 2'-O-methyladenosine-3'-phosphate
  modified_base 14: mod_base = OTHER; note = 2'-fluoroguanosine-3'-phosphate
  modified_base 15: mod_base = OTHER; note = 2'-O-methylcytidine-3'-phosphate
  modified_base 16: mod_base = OTHER; note = 2'-O-methylcytidine-3'-phosphate
  modified_base 17: mod_base = OTHER; note = 2'-O-methyluridine-3'-phosphate
  modified_base 18: mod_base = OTHER; note = 2'-O-methyluridine-3'-phosphate
  modified_base 19: mod_base = OTHER; note = 2'-O-methyluridine-3'-phosphate
  modified_base 20: mod_base = OTHER; note = 2'-O-methyladenosine-3'-phosphate
  modified_base 21: mod_base = OTHER; note = 2'-O-methyluridine-3'-phosphorothioate
  modified_base 22: mod_base = OTHER; note = 2'-O-methylcytidine-3'-phosphorothioate
  modified_base 23: mod_base = OTHER; note = 2'-O-methyladenosine-3'-phosphate
  misc_feature 1: note = RNA
  misc_feature 2: note = DNA
  misc_feature 3..4: note = RNA
  misc_feature 5: note = DNA
  misc_feature 6: note = RNA
  misc_feature 7: note = DNA
  misc_feature 8..11: note = RNA
  misc_feature 12: note = DNA
  misc_feature 13..23: note = RNA
taatccaacagtagcctttatca

SEQ ID NO: 1101 - DNA, 23 bp, synthetic construct
  source 1..23: mol_type = other DNA
  modified_base 1: mod_base = OTHER; note = Vinyl-phosphonate-2'-O-methyluridine-3'-phosphate
  modified_base 2: mod_base = OTHER; note = 2'-fluoroadenosine-3'-phosphate
  modified_base 3: mod_base = OTHER; note = 2'-O-methyluridine-3'-phosphate
  modified_base 4: mod_base = OTHER; note = 2'-O-methylcytidine-3'-phosphate
  modified_base 6: mod_base = OTHER; note = 2'-O-methyladenosine-3'-phosphate
  modified_base 7: mod_base = OTHER; note = Thymidine-glycol nucleic acid (GNA) S-Isomer
  modified_base 8: mod_base = OTHER; note = 2'-O-methylcytidine-3'-phosphate
  modified_base 9: mod_base = OTHER; note = 2'-O-methylcytidine-3'-phosphate
  modified_base 10: mod_base = OTHER; note = 2'-O-methyladenosine-3'-phosphate
  modified_base 11: mod_base = OTHER; note = 2'-O-methyladenosine-3'-phosphate
  modified_base 12: mod_base = OTHER; note = 2'-O-methylcytidine-3'-phosphate
  modified_base 13: mod_base = OTHER; note = 2'-O-methyladenosine-3'-phosphate
  modified_base 14: mod_base = OTHER; note = 2'-fluoroguanosine-3'-phosphate
  modified_base 15: mod_base = OTHER; note = 2'-O-methyluridine-3'-phosphate
  modified_base 16: mod_base = OTHER; note = 2'-fluoroadenosine-3'-phosphate
  modified_base 17: mod_base = OTHER; note = 2'-O-methylguanosine-3'-phosphate
  modified_base 18: mod_base = OTHER; note = 2'-O-methylcytidine-3'-phosphate
  modified_base 19: mod_base = OTHER; note = 2'-O-methylcytidine-3'-phosphate
  modified_base 20: mod_base = OTHER; note = 2'-O-methyluridine-3'-phosphate
  modified_base 21: mod_base = OTHER; note = 2'-O-methyluridine-3'-phosphorothioate
  modified_base 22: mod_base = OTHER; note = 2'-O-methyluridine-3'-phosphorothioate
  modified_base 23: mod_base = OTHER; note = 2'-O-methyladenosine-3'-phosphate
  misc_feature 1..4: note = RNA
  misc_feature 5: note = DNA
  misc_feature 6: note = RNA
  misc_feature 7: note = DNA
  misc_feature 8..23: note = RNA
tatcaatccaacagtagccttta

SEQ ID NO: 1102 - DNA, 23 bp, synthetic construct
  source 1..23: mol_type = other DNA
  modified_base 1: mod_base = OTHER; note = Vinyl-phosphonate-2'-O-methyluridine-3'-phosphate
  modified_base 3: mod_base = OTHER; note = 2'-O-methyluridine-3'-phosphate
  modified_base 4: mod_base = OTHER; note = 2'-O-methylcytidine-3'-phosphate
  modified_base 6: mod_base = OTHER; note = 2'-O-methyladenosine-3'-phosphate
  modified_base 8: mod_base = OTHER; note = 2'-O-methylcytidine-3'-phosphate
  modified_base 9: mod_base = OTHER; note = 2'-O-methylcytidine-3'-phosphate
  modified_base 10: mod_base = OTHER; note = 2'-O-methyladenosine-3'-phosphate
  modified_base 11: mod_base = OTHER; note = 2'-O-methyladenosine-3'-phosphate
  modified_base 13: mod_base = OTHER; note = 2'-O-methyladenosine-3'-phosphate
  modified_base 14: mod_base = OTHER; note = 2'-fluoroguanosine-3'-phosphate
  modified_base 15: mod_base = OTHER; note = 2'-O-methyluridine-3'-phosphate
  modified_base 16: mod_base = OTHER; note = 2'-O-methyladenosine-3'-phosphate
  modified_base 17: mod_base = OTHER; note = 2'-O-methylguanosine-3'-phosphate
  modified_base 18: mod_base = OTHER; note = 2'-O-methylcytidine-3'-phosphate
  modified_base 19: mod_base = OTHER; note = 2'-O-methylcytidine-3'-phosphate
  modified_base 20: mod_base = OTHER; note = 2'-O-methyluridine-3'-phosphate
  modified_base 21: mod_base = OTHER; note = 2'-O-methyluridine-3'-phosphorothioate
  modified_base 22: mod_base = OTHER; note = 2'-O-methyluridine-3'-phosphorothioate
  modified_base 23: mod_base = OTHER; note = 2'-O-methyladenosine-3'-phosphate
  misc_feature 1: note = RNA
  misc_feature 2: note = DNA
  misc_feature 3..4: note = RNA
  misc_feature 5: note = DNA
  misc_feature 6: note = RNA
  misc_feature 7: note = DNA
  misc_feature 8..11: note = RNA
  misc_feature 12: note = DNA
  misc_feature 13..23: note = RNA
tatcaatccaacagtagccttta

SEQ ID NO: 1103 - DNA, 23 bp, synthetic construct
  source 1..23: mol_type = other DNA
  modified_base 1: mod_base = OTHER; note = Vinyl-phosphonate-2'-O-methyluridine-3'-phosphate
  modified_base 3: mod_base = OTHER; note = 2'-O-methyladenosine-3'-phosphate
  modified_base 4: mod_base = OTHER; note = 2'-O-methyluridine-3'-phosphate
  modified_base 6: mod_base = OTHER; note = 2'-O-methyladenosine-3'-phosphate
  modified_base 8: mod_base = OTHER; note = 2'-O-methyluridine-3'-phosphate
  modified_base 9: mod_base = OTHER; note = 2'-O-methylcytidine-3'-phosphate
  modified_base 10: mod_base = OTHER; note = 2'-O-methylcytidine-3'-phosphate
  modified_base 11: mod_base = OTHER; note = 2'-O-methyladenosine-3'-phosphate
  modified_base 13: mod_base = OTHER; note = 2'-O-methylcytidine-3'-phosphate
  modified_base 14: mod_base = OTHER; note = 2'-fluoroadenosine-3'-phosphate
  modified_base 15: mod_base = OTHER; note = 2'-O-methylguanosine-3'-phosphate
  modified_base 16: mod_base = OTHER; note = 2'-O-methyluridine-3'-phosphate
  modified_base 17: mod_base = OTHER; note = 2'-O-methyladenosine-3'-phosphate
  modified_base 18: mod_base = OTHER; note = 2'-O-methylguanosine-3'-phosphate
  modified_base 19: mod_base = OTHER; note = 2'-O-methylcytidine-3'-phosphate
  modified_base 20: mod_base = OTHER; note = 2'-O-methylcytidine-3'-phosphate
  modified_base 21: mod_base = OTHER; note = 2'-O-methyluridine-3'-phosphorothioate
  modified_base 22: mod_base = OTHER; note = 2'-O-methyluridine-3'-phosphorothioate
  modified_base 23: mod_base = OTHER; note = 2'-O-methyluridine-3'-phosphate
  misc_feature 1: note = RNA
  misc_feature 2: note = DNA
  misc_feature 3..4: note = RNA
  misc_feature 5: note = DNA
  misc_feature 6: note = RNA
  misc_feature 7: note = DNA
  misc_feature 8..11: note = RNA
  misc_feature 12: note = DNA
  misc_feature 13..23: note = RNA
taatcaatccaacagtagccttt

SEQ ID NO: 1104 - DNA, 23 bp, synthetic construct
  source 1..23: mol_type = other DNA
  modified_base 1: mod_base = OTHER; note = Vinyl-phosphonate-2'-O-methyluridine-3'-phosphate
  modified_base 2: mod_base = OTHER; note = 2'-fluoroguanosine-3'-phosphate
  modified_base 3: mod_base = OTHER; note = 2'-O-methyladenosine-3'-phosphate
  modified_base 4: mod_base = OTHER; note = 2'-O-methyladenosine-3'-phosphate
  modified_base 6: mod_base = OTHER; note = 2'-O-methylcytidine-3'-phosphate
  modified_base 7: mod_base = OTHER; note = Adenosine-glycol nucleic acid (GNA)
  modified_base 8: mod_base = OTHER; note = 2'-O-methyladenosine-3'-phosphate
  modified_base 9: mod_base = OTHER; note = 2'-O-methyluridine-3'-phosphate
  modified_base 10: mod_base = OTHER; note = 2'-O-methylcytidine-3'-phosphate
  modified_base 11: mod_base = OTHER; note = 2'-O-methylcytidine-3'-phosphate
  modified_base 12: mod_base = OTHER; note = 2'-O-methyladenosine-3'-phosphate
  modified_base 13: mod_base = OTHER; note = 2'-O-methyladenosine-3'-phosphate
  modified_base 14: mod_base = OTHER; note = 2'-fluorocytidine-3'-phosphate
  modified_base 15: mod_base = OTHER; note = 2'-O-methyladenosine-3'-phosphate
  modified_base 16: mod_base = OTHER; note = 2'-fluoroguanosine-3'-phosphate
  modified_base 17: mod_base = OTHER; note = 2'-O-methyluridine-3'-phosphate
  modified_base 18: mod_base = OTHER; note = 2'-O-methyladenosine-3'-phosphate
  modified_base 19: mod_base = OTHER; note = 2'-O-methylguanosine-3'-phosphate
  modified_base 20: mod_base = OTHER; note = 2'-O-methylcytidine-3'-phosphate
  modified_base 21: mod_base = OTHER; note = 2'-O-methylcytidine-3'-phosphorothioate
  modified_base 22: mod_base = OTHER; note = 2'-O-methyluridine-3'-phosphorothioate
  modified_base 23: mod_base = OTHER; note = 2'-O-methyluridine-3'-phosphate
  misc_feature 1..4: note = RNA
  misc_feature 5: note = DNA
  misc_feature 6..23: note = RNA
tgaatcaatccaacagtagcctt

SEQ ID NO: 1105 - DNA, 23 bp, synthetic construct
  source 1..23: mol_type = other DNA
  modified_base 1: mod_base = OTHER; note = Vinyl-phosphonate-2'-O-methyluridine-3'-phosphate
  modified_base 3: mod_base = OTHER; note = 2'-O-methylguanosine-3'-phosphate
  modified_base 4: mod_base = OTHER; note = 2'-O-methyladenosine-3'-phosphate
  modified_base 6: mod_base = OTHER; note = 2'-O-methyluridine-3'-phosphate
  modified_base 8: mod_base = OTHER; note = 2'-O-methyladenosine-3'-phosphate
  modified_base 9: mod_base = OTHER; note = 2'-O-methyladenosine-3'-phosphate
  modified_base 10: mod_base = OTHER; note = 2'-O-methyluridine-3'-phosphate
  modified_base 11: mod_base = OTHER; note = 2'-O-methylcytidine-3'-phosphate
  modified_base 13: mod_base = OTHER; note = 2'-O-methyladenosine-3'-phosphate
  modified_base 14: mod_base = OTHER; note = 2'-fluoroadenosine-3'-phosphate
  modified_base 15: mod_base = OTHER; note = 2'-O-methylcytidine-3'-phosphate
  modified_base 16: mod_base = OTHER; note = 2'-O-methyladenosine-3'-phosphate
  modified_base 17: mod_base = OTHER; note = 2'-O-methylguanosine-3'-phosphate
  modified_base 18: mod_base = OTHER; note = 2'-O-methyluridine-3'-phosphate
  modified_base 19: mod_base = OTHER; note = 2'-O-methyladenosine-3'-phosphate
  modified_base 20: mod_base = OTHER; note = 2'-O-methylguanosine-3'-phosphate
  modified_base 21: mod_base = OTHER; note = 2'-O-methylcytidine-3'-phosphorothioate
  modified_base 22: mod_base = OTHER; note = 2'-O-methylcytidine-3'-phosphorothioate
  modified_base 23: mod_base = OTHER; note = 2'-O-methyluridine-3'-phosphate
  misc_feature 1: note = RNA
  misc_feature 2: note = DNA
  misc_feature 3..4: note = RNA
  misc_feature 5: note = DNA
  misc_feature 6: note = RNA
  misc_feature 7: note = DNA
  misc_feature 8..11: note = RNA
  misc_feature 12: note = DNA
  misc_feature 13..23: note = RNA
tcgaatcaatccaacagtagcct

SEQ ID NO: 1106 - DNA, 23 bp, synthetic construct
  source 1..23: mol_type = other DNA
  modified_base 1: mod_base = OTHER; note = Vinyl-phosphonate-2'-O-methyluridine-3'-phosphate
  modified_base 3: mod_base = OTHER; note = 2'-O-methylcytidine-3'-phosphate
  modified_base 4: mod_base = OTHER; note = 2'-O-methylguanosine-3'-phosphate
  modified_base 6: mod_base = OTHER; note = 2'-O-methyladenosine-3'-phosphate
  modified_base 8: mod_base = OTHER; note = 2'-O-methylcytidine-3'-phosphate
  modified_base 9: mod_base = OTHER; note = 2'-O-methyladenosine-3'-phosphate
  modified_base 10: mod_base = OTHER; note = 2'-O-methyladenosine-3'-phosphate
  modified_base 11: mod_base = OTHER; note = 2'-O-methyluridine-3'-phosphate
  modified_base 13: mod_base = OTHER; note = 2'-O-methylcytidine-3'-phosphate
  modified_base 14: mod_base = OTHER; note = 2'-fluoroadenosine-3'-phosphate
  modified_base 15: mod_base = OTHER; note = 2'-O-methyladenosine-3'-phosphate
  modified_base 16: mod_base = OTHER; note = 2'-O-methylcytidine-3'-phosphate
  modified_base 17: mod_base = OTHER; note = 2'-O-methyladenosine-3'-phosphate
  modified_base 18: mod_base = OTHER; note = 2'-O-methylguanosine-3'-phosphate
  modified_base 19: mod_base = OTHER; note = 2'-O-methyluridine-3'-phosphate
  modified_base 20: mod_base = OTHER; note = 2'-O-methyladenosine-3'-phosphate
  modified_base 21: mod_base = OTHER; note = 2'-O-methylguanosine-3'-phosphorothioate
  modified_base 22: mod_base = OTHER; note = 2'-O-methylcytidine-3'-phosphorothioate
  modified_base 23: mod_base = OTHER; note = 2'-O-methylcytidine-3'-phosphate
  misc_feature 1: note = RNA
  misc_feature 2: note = DNA
  misc_feature 3..4: note = RNA
  misc_feature 5: note = DNA
  misc_feature 6: note = RNA
  misc_feature 7: note = DNA
  misc_feature 8..11: note = RNA
  misc_feature 12: note = DNA
  misc_feature 13..23: note = RNA
ttcgaatcaatccaacagtagcc

SEQ ID NO: 1107 - DNA, 23 bp, synthetic construct
  source 1..23: mol_type = other DNA
  modified_base 1: mod_base = OTHER; note = Vinyl-phosphonate-2'-O-methyluridine-3'-phosphate
  modified_base 3: mod_base = OTHER; note = 2'-O-methyluridine-3'-phosphate
  modified_base 4: mod_base = OTHER; note = 2'-O-methyluridine-3'-phosphate
  modified_base 6: mod_base = OTHER; note = 2'-O-methylguanosine-3'-phosphate
  modified_base 8: mod_base = OTHER; note = 2'-O-methyladenosine-3'-phosphate
  modified_base 9: mod_base = OTHER; note = 2'-O-methyluridine-3'-phosphate
  modified_base 10: mod_base = OTHER; note = 2'-O-methylcytidine-3'-phosphate
  modified_base 11: mod_base = OTHER; note = 2'-O-methyladenosine-3'-phosphate
  modified_base 13: mod_base = OTHER; note = 2'-O-methyluridine-3'-phosphate
  modified_base 14: mod_base = OTHER; note = 2'-fluorocytidine-3'-phosphate
  modified_base 15: mod_base = OTHER; note = 2'-O-methylcytidine-3'-phosphate
  modified_base 16: mod_base = OTHER; note = 2'-O-methyladenosine-3'-phosphate
  modified_base 17: mod_base = OTHER; note = 2'-O-methyladenosine-3'-phosphate
  modified_base 18: mod_base = OTHER; note = 2'-O-methylcytidine-3'-phosphate
  modified_base 19: mod_base = OTHER; note = 2'-O-methyladenosine-3'-phosphate
  modified_base 20: mod_base = OTHER; note = 2'-O-methylguanosine-3'-phosphate
  modified_base 21: mod_base = OTHER; note = 2'-O-methyluridine-3'-phosphorothioate
  modified_base 22: mod_base = OTHER; note = 2'-O-methyladenosine-3'-phosphorothioate
  modified_base 23: mod_base = OTHER; note = 2'-O-methylguanosine-3'-phosphate
  misc_feature 1: note = RNA
  misc_feature 2: note = DNA
  misc_feature 3..4: note = RNA
  misc_feature 5: note = DNA
  misc_feature 6: note = RNA
  misc_feature 7: note = DNA
  misc_feature 8..11: note = RNA
  misc_feature 12: note = DNA
  misc_feature 13..23: note = RNA
ttttcgaatcaatccaacagtag

SEQ ID NO: 1108 - DNA, 23 bp, synthetic construct
  source 1..23: mol_type = other DNA
  modified_base 1: mod_base = OTHER; note = Vinyl-phosphonate-2'-O-methyluridine-3'-phosphate
  modified_base 3: mod_base = OTHER; note = 2'-O-methyluridine-3'-phosphate
  modified_base 4: mod_base = OTHER; note = 2'-O-methyluridine-3'-phosphate
  modified_base 6: mod_base = OTHER; note = 2'-O-methylcytidine-3'-phosphate
  modified_base 8: mod_base = OTHER; note = 2'-O-methyladenosine-3'-phosphate
  modified_base 9: mod_base = OTHER; note = 2'-O-methyladenosine-3'-phosphate
  modified_base 10: mod_base = OTHER; note = 2'-O-methyluridine-3'-phosphate
  modified_base 11: mod_base = OTHER; note = 2'-O-methylcytidine-3'-phosphate
  modified_base 13: mod_base = OTHER; note = 2'-O-methyladenosine-3'-phosphate
  modified_base 14: mod_base = OTHER; note = 2'-fluorouridine-3'-phosphate
  modified_base 15: mod_base = OTHER; note = 2'-O-methylcytidine-3'-phosphate
  modified_base 16: mod_base = OTHER; note = 2'-O-methylcytidine-3'-phosphate
  modified_base 17: mod_base = OTHER; note = 2'-O-methyladenosine-3'-phosphate
  modified_base 18: mod_base = OTHER; note = 2'-O-methyladenosine-3'-phosphate
  modified_base 19: mod_base = OTHER; note = 2'-O-methylcytidine-3'-phosphate
  modified_base 20: mod_base = OTHER; note = 2'-O-methyladenosine-3'-phosphate
  modified_base 21: mod_base = OTHER; note = 2'-O-methylguanosine-3'-phosphorothioate
  modified_base 22: mod_base = OTHER; note = 2'-O-methyluridine-3'-phosphorothioate
  modified_base 23: mod_base = OTHER; note = 2'-O-methyladenosine-3'-phosphate
  misc_feature 1: note = RNA
  misc_feature 2: note = DNA
  misc_feature 3..4: note = RNA
  misc_feature 5: note = DNA
  misc_feature 6: note = RNA
  misc_feature 7: note = DNA
  misc_feature 8..11: note = RNA
  misc_feature 12: note = DNA
  misc_feature 13..23: note = RNA
tatttcgaatcaatccaacagta

SEQ ID NO: 1109 - DNA, 23 bp, synthetic construct
  source 1..23: mol_type = other DNA
  modified_base 1: mod_base = OTHER; note = Vinyl-phosphonate-2'-O-methyluridine-3'-phosphate
  modified_base 3: mod_base = OTHER; note = 2'-O-methylguanosine-3'-phosphate
  modified_base 4: mod_base = OTHER; note = 2'-O-methyladenosine-3'-phosphate
  modified_base 6: mod_base = OTHER; note = 2'-O-methyluridine-3'-phosphate
  modified_base 8: mod_base = OTHER; note = 2'-O-methylcytidine-3'-phosphate
  modified_base 9: mod_base = OTHER; note = 2'-O-methylguanosine-3'-phosphate
  modified_base 10: mod_base = OTHER; note = 2'-O-methyladenosine-3'-phosphate
  modified_base 11: mod_base = OTHER; note = 2'-O-methyladenosine-3'-phosphate
  modified_base 13: mod_base = OTHER; note = 2'-O-methylcytidine-3'-phosphate
  modified_base 14: mod_base = OTHER; note = 2'-fluoroadenosine-3'-phosphate
  modified_base 15: mod_base = OTHER; note = 2'-O-methyladenosine-3'-phosphate
  modified_base 16: mod_base = OTHER; note = 2'-O-methyluridine-3'-phosphate
  modified_base 17: mod_base = OTHER; note = 2'-O-methylcytidine-3'-phosphate
  modified_base 18: mod_base = OTHER; note = 2'-O-methylcytidine-3'-phosphate
  modified_base 19: mod_base = OTHER; note = 2'-O-methyladenosine-3'-phosphate
  modified_base 20: mod_base = OTHER; note = 2'-O-methyladenosine-3'-phosphate
  modified_base 21: mod_base = OTHER; note = 2'-O-methylcytidine-3'-phosphorothioate
  modified_base 22: mod_base = OTHER; note = 2'-O-methyladenosine-3'-phosphorothioate
  modified_base 23: mod_base = OTHER; note = 2'-O-methylguanosine-3'-phosphate
  misc_feature 1: note = RNA
  misc_feature 2: note = DNA
  misc_feature 3..4: note = RNA
  misc_feature 5: note = DNA
  misc_feature 6: note = RNA
  misc_feature 7: note = DNA
  misc_feature 8..11: note = RNA
  misc_feature 12: note = DNA
  misc_feature 13..23: note = RNA
tagatttcgaatcaatccaacag

SEQ ID NO: 1110 - DNA, 23 bp, synthetic construct
  source 1..23: mol_type = other DNA
  modified_base 1: mod_base = OTHER; note = Vinyl-phosphonate-2'-O-methyluridine-3'-phosphate
  modified_base 2: mod_base = OTHER; note = 2'-fluoroadenosine-3'-phosphate
  modified_base 3: mod_base = OTHER; note = 2'-O-methylguanosine-3'-phosphate
  modified_base 4: mod_base = OTHER; note = 2'-O-methyladenosine-3'-phosphate
  modified_base 6: mod_base = OTHER; note = 2'-O-methyluridine-3'-phosphate
  modified_base 7: mod_base = OTHER; note = Thymidine-glycol nucleic acid (GNA) S-Isomer
  modified_base 8: mod_base = OTHER; note = 2'-O-methylcytidine-3'-phosphate
  modified_base 9: mod_base = OTHER; note = 2'-O-methylguanosine-3'-phosphate
  modified_base 10: mod_base = OTHER; note = 2'-O-methyladenosine-3'-phosphate
  modified_base 11: mod_base = OTHER; note = 2'-O-methyladenosine-3'-phosphate
  modified_base 12: mod_base = OTHER; note = 2'-O-methyluridine-3'-phosphate
  modified_base 13: mod_base = OTHER; note = 2'-O-methylcytidine-3'-phosphate
  modified_base 14: mod_base = OTHER; note = 2'-fluoroadenosine-3'-phosphate
  modified_base 15: mod_base = OTHER; note = 2'-O-methyladenosine-3'-phosphate
  modified_base 16: mod_base = OTHER; note = 2'-fluorouridine-3'-phosphate
  modified_base 17: mod_base = OTHER; note = 2'-O-methylcytidine-3'-phosphate
  modified_base 18: mod_base = OTHER; note = 2'-O-methylcytidine-3'-phosphate
  modified_base 19: mod_base = OTHER; note = 2'-O-methyladenosine-3'-phosphate
  modified_base 20: mod_base = OTHER; note = 2'-O-methyladenosine-3'-phosphate
  modified_base 21: mod_base = OTHER; note = 2'-O-methylcytidine-3'-phosphorothioate
  modified_base 22: mod_base = OTHER; note = 2'-O-methyladenosine-3'-phosphorothioate
  modified_base 23: mod_base = OTHER; note = 2'-O-methylguanosine-3'-phosphate
  misc_feature 1..4: note = RNA
  misc_feature 5: note = DNA
  misc_feature 6: note = RNA
  misc_feature 7: note = DNA
  misc_feature 8..23: note = RNA
tagatttcgaatcaatccaacag

SEQ ID NO: 1111 - DNA, 23 bp, synthetic construct
  source 1..23: mol_type = other DNA
  modified_base 1: mod_base = OTHER; note = Vinyl-phosphonate-2'-O-methyluridine-3'-phosphate
  modified_base 3: mod_base = OTHER; note = 2'-O-methyladenosine-3'-phosphate
  modified_base 4: mod_base = OTHER; note = 2'-O-methylguanosine-3'-phosphate
  modified_base 6: mod_base = OTHER; note = 2'-O-methyluridine-3'-phosphate
  modified_base 8: mod_base = OTHER; note = 2'-O-methyluridine-3'-phosphate
  modified_base 9: mod_base = OTHER; note = 2'-O-methylcytidine-3'-phosphate
  modified_base 10: mod_base = OTHER; note = 2'-O-methylguanosine-3'-phosphate
  modified_base 11: mod_base = OTHER; note = 2'-O-methyladenosine-3'-phosphate
  modified_base 13: mod_base = OTHER; note = 2'-O-methyluridine-3'-phosphate
  modified_base 14: mod_base = OTHER; note = 2'-fluorocytidine-3'-phosphate
  modified_base 15: mod_base = OTHER; note = 2'-O-methyladenosine-3'-phosphate
  modified_base 16: mod_base = OTHER; note = 2'-O-methyladenosine-3'-phosphate
  modified_base 17: mod_base = OTHER; note = 2'-O-methyluridine-3'-phosphate
  modified_base 18: mod_base = OTHER; note = 2'-O-methylcytidine-3'-phosphate
  modified_base 19: mod_base = OTHER; note = 2'-O-methylcytidine-3'-phosphate
  modified_base 20: mod_base = OTHER; note = 2'-O-methyladenosine-3'-phosphate
  modified_base 21: mod_base = OTHER; note = 2'-O-methyladenosine-3'-phosphorothioate
  modified_base 22: mod_base = OTHER; note = 2'-O-methylcytidine-3'-phosphorothioate
  modified_base 23: mod_base = OTHER; note = 2'-O-methyladenosine-3'-phosphate
  misc_feature 1: note = RNA
  misc_feature 2: note = DNA
  misc_feature 3..4: note = RNA
  misc_feature 5: note = DNA
  misc_feature 6: note = RNA
  misc_feature 7: note = DNA
  misc_feature 8..11: note = RNA
  misc_feature 12: note = DNA
  misc_feature 13..23: note = RNA
taagatttcgaatcaatccaaca

SEQ ID NO: 1112 - DNA, 23 bp, synthetic construct
  source 1..23: mol_type = other DNA
  modified_base 1: mod_base = OTHER; note = Vinyl-phosphonate-2'-O-methyluridine-3'-phosphate
  modified_base 2: mod_base = OTHER; note = 2'-fluoroguanosine-3'-phosphate
  modified_base 3: mod_base = OTHER; note = 2'-O-methylcytidine-3'-phosphate
  modified_base 4: mod_base = OTHER; note = 2'-O-methyladenosine-3'-phosphate
  modified_base 6: mod_base = OTHER; note = 2'-O-methylguanosine-3'-phosphate
  modified_base 7: mod_base = OTHER; note = Adenosine-glycol nucleic acid (GNA)
  modified_base 8: mod_base = OTHER; note = 2'-O-methyluridine-3'-phosphate
  modified_base 9: mod_base = OTHER; note = 2'-O-methyluridine-3'-phosphate
  modified_base 10: mod_base = OTHER; note = 2'-O-methyluridine-3'-phosphate
  modified_base 11: mod_base = OTHER; note = 2'-O-methylcytidine-3'-phosphate
  modified_base 12: mod_base = OTHER; note = 2'-O-methylguanosine-3'-phosphate
  modified_base 13: mod_base = OTHER; note = 2'-O-methyladenosine-3'-phosphate
  modified_base 14: mod_base = OTHER; note = 2'-fluoroadenosine-3'-phosphate
  modified_base 15: mod_base = OTHER; note = 2'-O-methyluridine-3'-phosphate
  modified_base 16: mod_base = OTHER; note = 2'-fluorocytidine-3'-phosphate
  modified_base 17: mod_base = OTHER; note = 2'-O-methyladenosine-3'-phosphate
  modified_base 18: mod_base = OTHER; note = 2'-O-methyladenosine-3'-phosphate
  modified_base 19: mod_base = OTHER; note = 2'-O-methyluridine-3'-phosphate
  modified_base 20: mod_base = OTHER; note = 2'-O-methylcytidine-3'-phosphate
  modified_base 21: mod_base = OTHER; note = 2'-O-methylcytidine-3'-phosphorothioate
  modified_base 22: mod_base = OTHER; note = 2'-O-methyladenosine-3'-phosphorothioate
  modified_base 23: mod_base = OTHER; note = 2'-O-methyladenosine-3'-phosphate
  misc_feature 1..4: note = RNA
  misc_feature 5: note = DNA
  misc_feature 6..23: note = RNA
tgcaagatttcgaatcaatccaa

SEQ ID NO: 1113 - DNA, 23 bp, synthetic construct
  source 1..23: mol_type = other DNA
  modified_base 1: mod_base = OTHER; note = Vinyl-phosphonate-2'-O-methyluridine-3'-phosphate
  modified_base 3: mod_base = OTHER; note = 2'-O-methylcytidine-3'-phosphate
  modified_base 4: mod_base = OTHER; note = 2'-O-methyladenosine-3'-phosphate
  modified_base 6: mod_base = OTHER; note = 2'-O-methylguanosine-3'-phosphate
  modified_base 8: mod_base = OTHER; note = 2'-O-methyluridine-3'-phosphate
  modified_base 9: mod_base = OTHER; note = 2'-O-methyluridine-3'-phosphate
  modified_base 10: mod_base = OTHER; note = 2'-O-methyluridine-3'-phosphate
  modified_base 11: mod_base = OTHER; note = 2'-O-methylcytidine-3'-phosphate
  modified_base 13: mod_base = OTHER; note = 2'-O-methyladenosine-3'-phosphate
  modified_base 14: mod_base = OTHER; note = 2'-fluoroadenosine-3'-phosphate
  modified_base 15: mod_base = OTHER; note = 2'-O-methyluridine-3'-phosphate
  modified_base 16: mod_base = OTHER; note = 2'-O-methylcytidine-3'-phosphate
  modified_base 17: mod_base = OTHER; note = 2'-O-methyladenosine-3'-phosphate
  modified_base 18: mod_base = OTHER; note = 2'-O-methyladenosine-3'-phosphate
  modified_base 19: mod_base = OTHER; note = 2'-O-methyluridine-3'-phosphate
  modified_base 20: mod_base = OTHER; note = 2'-O-methylcytidine-3'-phosphate
  modified_base 21: mod_base = OTHER; note = 2'-O-methylcytidine-3'-phosphorothioate
  modified_base 22: mod_base = OTHER; note = 2'-O-methyladenosine-3'-phosphorothioate
  modified_base 23: mod_base = OTHER; note = 2'-O-methyladenosine-3'-phosphate
  misc_feature 1: note = RNA
  misc_feature 2: note = DNA
  misc_feature 3..4: note = RNA
  misc_feature 5: note = DNA
  misc_feature 6: note = RNA
  misc_feature 7: note = DNA
  misc_feature 8..11: note = RNA
  misc_feature 12: note = DNA
  misc_feature 13..23: note = RNA
tgcaagatttcgaatcaatccaa

SEQ ID NO: 1114 - DNA, 23 bp, synthetic construct
  source 1..23: mol_type = other DNA
  modified_base 1: mod_base = OTHER; note = Vinyl-phosphonate-2'-O-methyluridine-3'-phosphate
  modified_base 2: mod_base = OTHER; note = 2'-fluoroadenosine-3'-phosphate
  modified_base 3: mod_base = OTHER; note = 2'-O-methylguanosine-3'-phosphate
  modified_base 4: mod_base = OTHER; note = 2'-O-methylguanosine-3'-phosphate
  modified_base 6: mod_base = OTHER; note = 2'-O-methylcytidine-3'-phosphate
  modified_base 7: mod_base = OTHER; note = Adenosine-glycol nucleic acid (GNA)
  modified_base 8: mod_base = OTHER; note = 2'-O-methyladenosine-3'-phosphate
  modified_base 9: mod_base = OTHER; note = 2'-O-methylguanosine-3'-phosphate
  modified_base 10: mod_base = OTHER; note = 2'-O-methyladenosine-3'-phosphate
  modified_base 11: mod_base = OTHER; note = 2'-O-methyluridine-3'-phosphate
  modified_base 12: mod_base = OTHER; note = 2'-O-methyluridine-3'-phosphate
  modified_base 13: mod_base = OTHER; note = 2'-O-methyluridine-3'-phosphate
  modified_base 14: mod_base = OTHER; note = 2'-fluorocytidine-3'-phosphate
  modified_base 15: mod_base = OTHER; note = 2'-O-methylguanosine-3'-phosphate
  modified_base 16: mod_base = OTHER; note = 2'-fluoroadenosine-3'-phosphate
  modified_base 17: mod_base = OTHER; note = 2'-O-methyladenosine-3'-phosphate
  modified_base 18: mod_base = OTHER; note = 2'-O-methyluridine-3'-phosphate
  modified_base 19: mod_base = OTHER; note = 2'-O-methylcytidine-3'-phosphate
  modified_base 20: mod_base = OTHER; note = 2'-O-methyladenosine-3'-phosphate
  modified_base 21: mod_base = OTHER; note = 2'-O-methyladenosine-3'-phosphorothioate
  modified_base 22: mod_base = OTHER; note = 2'-O-methyluridine-3'-phosphorothioate
  modified_base 23: mod_base = OTHER; note = 2'-O-methylcytidine-3'-phosphate
  misc_feature 1..4: note = RNA
  misc_feature 5: note = DNA
  misc_feature 6..23: note = RNA
tagggcaagatttcgaatcaatc

SEQ ID NO: 1115 - DNA, 23 bp, synthetic construct
  source 1..23: mol_type = other DNA
  modified_base 1: mod_base = OTHER; note = Vinyl-phosphonate-2'-O-methyluridine-3'-phosphate
  modified_base 2: mod_base = OTHER; note = 2'-fluoroadenosine-3'-phosphate
  modified_base 3: mod_base = OTHER; note = 2'-O-methyladenosine-3'-phosphate
  modified_base 4: mod_base = OTHER; note = 2'-O-methylcytidine-3'-phosphate
  modified_base 6: mod_base = OTHER; note = 2'-O-methylguanosine-3'-phosphate
  modified_base 7: mod_base = OTHER; note = Adenosine-glycol nucleic acid (GNA)
  modified_base 8: mod_base = OTHER; note = 2'-O-methyladenosine-3'-phosphate
  modified_base 9: mod_base = OTHER; note = 2'-O-methylcytidine-3'-phosphate
  modified_base 10: mod_base = OTHER; note = 2'-O-methyluridine-3'-phosphate
  modified_base 11: mod_base = OTHER; note = 2'-O-methyladenosine-3'-phosphate
  modified_base 12: mod_base = OTHER; note = 2'-O-methylguanosine-3'-phosphate
  modified_base 13: mod_base = OTHER; note = 2'-O-methyluridine-3'-phosphate
  modified_base 14: mod_base = OTHER; note = 2'-fluorocytidine-3'-phosphate
  modified_base 15: mod_base = OTHER; note = 2'-O-methylguanosine-3'-phosphate
  modified_base 16: mod_base = OTHER; note = 2'-fluorouridine-3'-phosphate
  modified_base 17: mod_base = OTHER; note = 2'-O-methylguanosine-3'-phosphate
  modified_base 18: mod_base = OTHER; note = 2'-O-methylguanosine-3'-phosphate
  modified_base 19: mod_base = OTHER; note = 2'-O-methyladenosine-3'-phosphate
  modified_base 20: mod_base = OTHER; note = 2'-O-methyladenosine-3'-phosphate
  modified_base 21: mod_base = OTHER; note = 2'-O-methyluridine-3'-phosphorothioate
  modified_base 22: mod_base = OTHER; note = 2'-O-methylguanosine-3'-phosphorothioate
  modified_base 23: mod_base = OTHER; note = 2'-O-methylguanosine-3'-phosphate
  misc_feature 1..4: note = RNA
  misc_feature 5: note = DNA
  misc_feature 6..23: note = RNA
taactgaactagtcgtggaatgg

SEQ ID NO: 1116 - DNA, 23 bp, synthetic construct
  source 1..23: mol_type = other DNA
  modified_base 1: mod_base = OTHER; note = Vinyl-phosphonate-2'-O-methyluridine-3'-phosphate
  modified_base 3: mod_base = OTHER; note = 2'-O-methylguanosine-3'-phosphate
  modified_base 4: mod_base = OTHER; note = 2'-O-methylcytidine-3'-phosphate
  modified_base 6: mod_base = OTHER; note = 2'-O-methyladenosine-3'-phosphate
  modified_base 8: mod_base = OTHER; note = 2'-O-methyluridine-3'-phosphate
  modified_base 9: mod_base = OTHER; note = 2'-O-methylguanosine-3'-phosphate
  modified_base 10: mod_base = OTHER; note = 2'-O-methyladenosine-3'-phosphate
  modified_base 11: mod_base = OTHER; note = 2'-O-methyladenosine-3'-phosphate
  modified_base 13: mod_base = OTHER; note = 2'-O-methyluridine-3'-phosphate
  modified_base 14: mod_base = OTHER; note = 2'-fluoroadenosine-3'-phosphate
  modified_base 15: mod_base = OTHER; note = 2'-O-methylguanosine-3'-phosphate
  modified_base 16: mod_base = OTHER; note = 2'-O-methyluridine-3'-phosphate
  modified_base 17: mod_base = OTHER; note = 2'-O-methylcytidine-3'-phosphate
  modified_base 18: mod_base = OTHER; note = 2'-O-methylguanosine-3'-phosphate
  modified_base 19: mod_base = OTHER; note = 2'-O-methyluridine-3'-phosphate
  modified_base 20: mod_base = OTHER; note = 2'-O-methylguanosine-3'-phosphate
  modified_base 21: mod_base = OTHER; note = 2'-O-methylguanosine-3'-phosphorothioate
  modified_base 22: mod_base = OTHER; note = 2'-O-methyladenosine-3'-phosphorothioate
  modified_base 23: mod_base = OTHER; note = 2'-O-methyladenosine-3'-phosphate
  misc_feature 1: note = RNA
  misc_feature 2: note = DNA
  misc_feature 3..4: note = RNA
  misc_feature 5: note = DNA
  misc_feature 6: note = RNA
  misc_feature 7: note = DNA
  misc_feature 8..11: note = RNA
  misc_feature 12: note = DNA
  misc_feature 13..23: note = RNA
tagcaactgaactagtcgtggaa

SEQ ID NO: 1117 - DNA, 23 bp, synthetic construct
  source 1..23: mol_type = other DNA
  modified_base 1: mod_base = OTHER; note = Vinyl-phosphonate-2'-O-methyluridine-3'-phosphate
  modified_base 3: mod_base = OTHER; note = 2'-O-methylguanosine-3'-phosphate
  modified_base 4: mod_base = OTHER; note = 2'-O-methylcytidine-3'-phosphate
  modified_base 6: mod_base = OTHER; note = 2'-O-methylcytidine-3'-phosphate
  modified_base 8: mod_base = OTHER; note = 2'-O-methyladenosine-3'-phosphate
  modified_base 9: mod_base = OTHER; note = 2'-O-methyladenosine-3'-phosphate
  modified_base 10: mod_base = OTHER; note = 2'-O-methylcytidine-3'-phosphate
  modified_base 11: mod_base = OTHER; note = 2'-O-methyladenosine-3'-phosphate
  modified_base 13: mod_base = OTHER; note = 2'-O-methylguanosine-3'-phosphate
  modified_base 14: mod_base = OTHER; note = 2'-fluorocytidine-3'-phosphate
  modified_base 15: mod_base = OTHER; note = 2'-O-methyladenosine-3'-phosphate
  modified_base 16: mod_base = OTHER; note = 2'-O-methyladenosine-3'-phosphate
  modified_base 17: mod_base = OTHER; note = 2'-O-methylcytidine-3'-phosphate
  modified_base 18: mod_base = OTHER; note = 2'-O-methyluridine-3'-phosphate
  modified_base 19: mod_base = OTHER; note = 2'-O-methylguanosine-3'-phosphate
  modified_base 20: mod_base = OTHER; note = 2'-O-methyladenosine-3'-phosphate
  modified_base 21: mod_base = OTHER; note = 2'-O-methyladenosine-3'-phosphorothioate
  modified_base 22: mod_base = OTHER; note = 2'-O-methylcytidine-3'-phosphorothioate
  modified_base 23: mod_base = OTHER; note = 2'-O-methyluridine-3'-phosphate
  misc_feature 1: note = RNA
  misc_feature 2: note = DNA
  misc_feature 3..4: note = RNA
  misc_feature 5: note = DNA
  misc_feature 6: note = RNA
  misc_feature 7: note = DNA
  misc_feature 8..11: note = RNA
  misc_feature 12: note = DNA
  misc_feature 13..23: note = RNA
ttgcacgaacaagcaactgaact

SEQ ID NO: 1118 - DNA, 23 bp, synthetic construct
  source 1..23: mol_type = other DNA
  modified_base 1: mod_base = OTHER; note = Vinyl-phosphonate-2'-O-methyluridine-3'-phosphate
  modified_base 3: mod_base = OTHER; note = 2'-O-methyladenosine-3'-phosphate
  modified_base 4: mod_base = OTHER; note = 2'-O-methylcytidine-3'-phosphate
  modified_base 6: mod_base = OTHER; note = 2'-O-methyladenosine-3'-phosphate
  modified_base 8: mod_base = OTHER; note = 2'-O-methyluridine-3'-phosphate
  modified_base 9: mod_base = OTHER; note = 2'-O-methyluridine-3'-phosphate
  modified_base 10: mod_base = OTHER; note = 2'-O-methylguanosine-3'-phosphate
  modified_base 11: mod_base = OTHER; note = 2'-O-methylcytidine-3'-phosphate
  modified_base 13: mod_base = OTHER; note = 2'-O-methylguanosine-3'-phosphate
  modified_base 14: mod_base = OTHER; note = 2'-fluorocytidine-3'-phosphate
  modified_base 15: mod_base = OTHER; note = 2'-O-methyluridine-3'-phosphate
  modified_base 16: mod_base = OTHER; note = 2'-O-methylguanosine-3'-phosphate
  modified_base 17: mod_base = OTHER; note = 2'-O-methyluridine-3'-phosphate
  modified_base 18: mod_base = OTHER; note = 2'-O-methylguanosine-3'-phosphate
  modified_base 19: mod_base = OTHER; note = 2'-O-methyluridine-3'-phosphate
  modified_base 20: mod_base = OTHER; note = 2'-O-methylcytidine-3'-phosphate
  modified_base 21: mod_base = OTHER; note = 2'-O-methylcytidine-3'-phosphorothioate
  modified_base 22: mod_base = OTHER; note = 2'-O-methylcytidine-3'-phosphorothioate
  modified_base 23: mod_base = OTHER; note = 2'-O-methyladenosine-3'-phosphate
  misc_feature 1: note = RNA
  misc_feature 2: note = DNA
  misc_feature 3..4: note = RNA
  misc_feature 5: note = DNA
  misc_feature 6: note = RNA
  misc_feature 7: note = DNA
  misc_feature 8..11: note = RNA
  misc_feature 12: note = DNA
  misc_feature 13..23: note = RNA
tcacaaattgctgctgtgtccca

SEQ ID NO: 1119 - DNA, 23 bp, synthetic construct
  source 1..23: mol_type = other DNA
  modified_base 1: mod_base = OTHER; note = Vinyl-phosphonate-2'-O-methyluridine-3'-phosphate
  modified_base 2: mod_base = OTHER; note = 2'-fluorouridine-3'-phosphate
  modified_base 3: mod_base = OTHER; note = 2'-O-methylguanosine-3'-phosphate
  modified_base 4: mod_base = OTHER; note = 2'-O-methyladenosine-3'-phosphate
  modified_base 6: mod_base = OTHER; note = 2'-O-methylcytidine-3'-phosphate
  modified_base 7: mod_base = OTHER; note = Adenosine-glycol nucleic acid (GNA)
  modified_base 8: mod_base = OTHER; note = 2'-O-methyluridine-3'-phosphate
  modified_base 9: mod_base = OTHER; note = 2'-O-methylcytidine-3'-phosphate
  modified_base 10: mod_base = OTHER; note = 2'-O-methylcytidine-3'-phosphate
  modified_base 11: mod_base = OTHER; note = 2'-O-methylcytidine-3'-phosphate
  modified_base 12: mod_base = OTHER; note = 2'-O-methylguanosine-3'-phosphate
  modified_base 13: mod_base = OTHER; note = 2'-O-methyladenosine-3'-phosphate
  modified_base 14: mod_base = OTHER; note = 2'-fluoroguanosine-3'-phosphate
  modified_base 15: mod_base = OTHER; note = 2'-O-methylcytidine-3'-phosphate
  modified_base 16: mod_base = OTHER; note = 2'-fluorouridine-3'-phosphate
  modified_base 17: mod_base = OTHER; note = 2'-O-methyladenosine-3'-phosphate
  modified_base 18: mod_base = OTHER; note = 2'-O-methylguanosine-3'-phosphate
  modified_base 19: mod_base = OTHER; note = 2'-O-methylguanosine-3'-phosphate
  modified_base 20: mod_base = OTHER; note = 2'-O-methyladenosine-3'-phosphate
  modified_base 21: mod_base = OTHER; note = 2'-O-methyluridine-3'-phosphorothioate
  modified_base 22: mod_base = OTHER; note = 2'-O-methylguanosine-3'-phosphorothioate
  modified_base 23: mod_base = OTHER; note = 2'-O-methyluridine-3'-phosphate
  misc_feature 1..4: note = RNA
  misc_feature 5: note = DNA
  misc_feature 6..23: note = RNA
ttgaacatcccgagctaggatgt

SEQ ID NO: 1120 - DNA, 23 bp, synthetic construct
  source 1..23: mol_type = other DNA
  modified_base 1: mod_base = OTHER; note = Vinyl-phosphonate-2'-O-methyluridine-3'-phosphate
  modified_base 2: mod_base = OTHER; note = 2'-fluoroguanosine-3'-phosphate
  modified_base 3: mod_base = OTHER; note = 2'-O-methylguanosine-3'-phosphate
  modified_base 4: mod_base = OTHER; note = 2'-O-methyluridine-3'-phosphate
  modified_base 6: mod_base = OTHER; note = 2'-O-methylguanosine-3'-phosphate
  modified_base 7: mod_base = OTHER; note = Thymidine-glycol nucleic acid (GNA) S-Isomer
  modified_base 8: mod_base = OTHER; note = 2'-O-methylguanosine-3'-phosphate
  modified_base 9: mod_base = OTHER; note = 2'-O-methyladenosine-3'-phosphate
  modified_base 10: mod_base = OTHER; note = 2'-O-methyladenosine-3'-phosphate
  modified_base 11: mod_base = OTHER; note = 2'-O-methylcytidine-3'-phosphate
  modified_base 12: mod_base = OTHER; note = 2'-O-methyladenosine-3'-phosphate
  modified_base 13: mod_base = OTHER; note = 2'-O-methyluridine-3'-phosphate
  modified_base 14: mod_base = OTHER; note = 2'-fluorocytidine-3'-phosphate
  modified_base 15: mod_base = OTHER; note = 2'-O-methylcytidine-3'-phosphate
  modified_base 16: mod_base = OTHER; note = 2'-fluorocytidine-3'-phosphate
  modified_base 17: mod_base = OTHER; note = 2'-O-methylguanosine-3'-phosphate
  modified_base 18: mod_base = OTHER; note = 2'-O-methyladenosine-3'-phosphate
  modified_base 19: mod_base = OTHER; note = 2'-O-methylguanosine-3'-phosphate
  modified_base 20: mod_base = OTHER; note = 2'-O-methylcytidine-3'-phosphate
  modified_base 21: mod_base = OTHER; note = 2'-O-methyluridine-3'-phosphorothioate
  modified_base 22: mod_base = OTHER; note = 2'-O-methyladenosine-3'-phosphorothioate
  modified_base 23: mod_base = OTHER; note = 2'-O-methylguanosine-3'-phosphate
  misc_feature 1..4: note = RNA
  misc_feature 5: note = DNA
  misc_feature 6: note = RNA
  misc_feature 7: note = DNA
  misc_feature 8..23: note = RNA
tggttgtgaacatcccgagctag

SEQ ID NO: 1121 - DNA, 23 bp, synthetic construct
  source 1..23: mol_type = other DNA
  modified_base 1: mod_base = OTHER; note = Vinyl-phosphonate-2'-O-methyluridine-3'-phosphate
  modified_base 3: mod_base = OTHER; note = 2'-O-methylcytidine-3'-phosphate
  modified_base 4: mod_base = OTHER; note = 2'-O-methyladenosine-3'-phosphate
  modified_base 6: mod_base = OTHER; note = 2'-O-methyluridine-3'-phosphate
  modified_base 8: mod_base = OTHER; note = 2'-O-methylcytidine-3'-phosphate
  modified_base 9: mod_base = OTHER; note = 2'-O-methylguanosine-3'-phosphate
  modified_base 10: mod_base = OTHER; note = 2'-O-methylguanosine-3'-phosphate
  modified_base 11: mod_base = OTHER; note = 2'-O-methyluridine-3'-phosphate
  modified_base 13: mod_base = OTHER; note = 2'-O-methylguanosine-3'-phosphate
  modified_base 14: mod_base = OTHER; note = 2'-fluorouridine-3'-phosphate
  modified_base 15: mod_base = OTHER; note = 2'-O-methylguanosine-3'-phosphate
  modified_base 16: mod_base = OTHER; note = 2'-O-methyladenosine-3'-phosphate
  modified_base 17: mod_base = OTHER; note = 2'-O-methyladenosine-3'-phosphate
  modified_base 18: mod_base = OTHER; note = 2'-O-methylcytidine-3'-phosphate
  modified_base 19: mod_base = OTHER; note = 2'-O-methyladenosine-3'-phosphate
  modified_base 20: mod_base = OTHER; note = 2'-O-methyluridine-3'-phosphate
  modified_base 21: mod_base = OTHER; note = 2'-O-methylcytidine-3'-phosphorothioate
  modified_base 22: mod_base = OTHER; note = 2'-O-methylcytidine-3'-phosphorothioate
  modified_base 23: mod_base = OTHER; note = 2'-O-methylcytidine-3'-phosphate
  misc_feature 1: note = RNA
  misc_feature 2: note = DNA
  misc_feature 3..4: note = RNA
  misc_feature 5: note = DNA
  misc_feature 6: note = RNA
  misc_feature 7: note = DNA
  misc_feature 8..11: note = RNA
  misc_feature 12: note = DNA
  misc_feature 13..23: note = RNA
tacaattcggttgtgaacatccc

SEQ ID NO: 1122 - DNA, 23 bp, synthetic construct
  source 1..23: mol_type = other DNA
  modified_base 1: mod_base = OTHER; note = Vinyl-phosphonate-2'-O-methyluridine-3'-phosphate
  modified_base 2: mod_base = OTHER; note = 2'-fluorouridine-3'-phosphate
  modified_base 3: mod_base = OTHER; note = 2'-O-methylguanosine-3'-phosphate
  modified_base 4: mod_base = OTHER; note = 2'-O-methylguanosine-3'-phosphate
  modified_base 6: mod_base = OTHER; note = 2'-O-methyladenosine-3'-phosphate
  modified_base 7: mod_base = OTHER; note = Thymidine-glycol nucleic acid (GNA) S-Isomer
  modified_base 8: mod_base = OTHER; note = 2'-O-methyluridine-3'-phosphate
  modified_base 9: mod_base = OTHER; note = 2'-O-methyluridine-3'-phosphate
  modified_base 10: mod_base = OTHER; note = 2'-O-methyladenosine-3'-phosphate
  modified_base 11: mod_base = OTHER; note = 2'-O-methylguanosine-3'-phosphate
  modified_base 12: mod_base = OTHER; note = 2'-O-methyluridine-3'-phosphate
  modified_base 13: mod_base = OTHER; note = 2'-O-methylcytidine-3'-phosphate
  modified_base 14: mod_base = OTHER; note = 2'-fluorocytidine-3'-phosphate
  modified_base 15: mod_base = OTHER; note = 2'-O-methyluridine-3'-phosphate
  modified_base 16: mod_base = OTHER; note = 2'-fluorocytidine-3'-phosphate
  modified_base 17: mod_base = OTHER; note = 2'-O-methyluridine-3'-phosphate
  modified_base 18: mod_base = OTHER; note = 2'-O-methylguanosine-3'-phosphate
  modified_base 19: mod_base = OTHER; note = 2'-O-methyladenosine-3'-phosphate
  modified_base 20: mod_base = OTHER; note = 2'-O-methyluridine-3'-phosphate
  modified_base 21: mod_base = OTHER; note = 2'-O-methyladenosine-3'-phosphorothioate
  modified_base 22: mod_base = OTHER; note = 2'-O-methyladenosine-3'-phosphorothioate
  modified_base 23: mod_base = OTHER; note = 2'-O-methylcytidine-3'-phosphate
  misc_feature 1..4: note = RNA
  misc_feature 5: note = DNA
  misc_feature 6: note = RNA
  misc_feature 7: note = DNA
  misc_feature 8..23: note = RNA
ttggtatttagtcctctgataac

SEQ ID NO: 1123 - DNA, 23 bp, synthetic construct
  source 1..23: mol_type = other DNA
  modified_base 1: mod_base = OTHER; note = Vinyl-phosphonate-2'-O-methyluridine-3'-phosphate
  modified_base 2: mod_base = OTHER; note = 2'-fluoroadenosine-3'-phosphate
  modified_base 3: mod_base = OTHER; note = 2'-O-methyluridine-3'-phosphate
  modified_base 4: mod_base = OTHER; note = 2'-O-methylguanosine-3'-phosphate
  modified_base 6: mod_base = OTHER; note = 2'-O-methyluridine-3'-phosphate
  modified_base 7: mod_base = OTHER; note = Adenosine-glycol nucleic acid (GNA)
  modified_base 8: mod_base = OTHER; note = 2'-O-methyluridine-3'-phosphate
  modified_base 9: mod_base = OTHER; note = 2'-O-methyluridine-3'-phosphate
  modified_base 10: mod_base = OTHER; note = 2'-O-methyluridine-3'-phosphate
  modified_base 11: mod_base = OTHER; note = 2'-O-methyladenosine-3'-phosphate
  modified_base 12: mod_base = OTHER; note = 2'-O-methylguanosine-3'-phosphate
  modified_base 13: mod_base = OTHER; note = 2'-O-methyluridine-3'-phosphate
  modified_base 14: mod_base = OTHER; note = 2'-fluorocytidine-3'-phosphate
  modified_base 15: mod_base = OTHER; note = 2'-O-methylcytidine-3'-phosphate
  modified_base 16: mod_base = OTHER; note = 2'-fluorouridine-3'-phosphate
  modified_base 17: mod_base = OTHER; note = 2'-O-methylcytidine-3'-phosphate
  modified_base 18: mod_base = OTHER; note = 2'-O-methyluridine-3'-phosphate
  modified_base 19: mod_base = OTHER; note = 2'-O-methylguanosine-3'-phosphate
  modified_base 20: mod_base = OTHER; note = 2'-O-methyladenosine-3'-phosphate
  modified_base 21: mod_base = OTHER; note = 2'-O-methyluridine-3'-phosphorothioate
  modified_base 22: mod_base = OTHER; note = 2'-O-methyladenosine-3'-phosphorothioate
  modified_base 23: mod_base = OTHER; note = 2'-O-methyladenosine-3'-phosphate
  misc_feature 1..4: note = RNA
  misc_feature 5: note = DNA
  misc_feature 6..23: note = RNA
tatggtatttagtcctctgataa

SEQ ID NO: 1124 - DNA, 23 bp, synthetic construct
  source 1..23: mol_type = other DNA
  modified_base 1: mod_base = OTHER; note = Vinyl-phosphonate-2'-O-methyluridine-3'-phosphate
  modified_base 2: mod_base = OTHER; note = 2'-fluoroadenosine-3'-phosphate
  modified_base 3: mod_base = OTHER; note = 2'-O-methyladenosine-3'-phosphate
  modified_base 4: mod_base = OTHER; note = 2'-O-methyluridine-3'-phosphate
  modified_base 6: mod_base = OTHER; note = 2'-O-methylguanosine-3'-phosphate
  modified_base 7: mod_base = OTHER; note = Thymidine-glycol nucleic acid (GNA) S-Isomer
  modified_base 8: mod_base = OTHER; note = 2'-O-methyladenosine-3'-phosphate
  modified_base 9: mod_base = OTHER; note = 2'-O-methyluridine-3'-phosphate
  modified_base 10: mod_base = OTHER; note = 2'-O-methyluridine-3'-phosphate
  modified_base 11: mod_base = OTHER; note = 2'-O-methyluridine-3'-phosphate
  modified_base 12: mod_base = OTHER; note = 2'-O-methyladenosine-3'-phosphate
  modified_base 13: mod_base = OTHER; note = 2'-O-methylguanosine-3'-phosphate
  modified_base 14: mod_base = OTHER; note = 2'-fluorouridine-3'-phosphate
  modified_base 15: mod_base = OTHER; note = 2'-O-methylcytidine-3'-phosphate
  modified_base 16: mod_base = OTHER; note = 2'-fluorocytidine-3'-phosphate
  modified_base 17: mod_base = OTHER; note = 2'-O-methyluridine-3'-phosphate
  modified_base 18: mod_base = OTHER; note = 2'-O-methylcytidine-3'-phosphate
  modified_base 19: mod_base = OTHER; note = 2'-O-methyluridine-3'-phosphate
  modified_base 20: mod_base = OTHER; note = 2'-O-methylguanosine-3'-phosphate
  modified_base 21: mod_base = OTHER; note = 2'-O-methyladenosine-3'-phosphorothioate
  modified_base 22: mod_base = OTHER; note = 2'-O-methyluridine-3'-phosphorothioate
  modified_base 23: mod_base = OTHER; note = 2'-O-methyladenosine-3'-phosphate
  misc_feature 1..4: note = RNA
  misc_feature 5: note = DNA
  misc_feature 6: note = RNA
  misc_feature 7: note = DNA
  misc_feature 8..23: note = RNA
taatggtatttagtcctctgata

SEQ ID NO: 1125 - DNA, 23 bp, synthetic construct
  source 1..23: mol_type = other DNA
  modified_base 1: mod_base = OTHER; note = Vinyl-phosphonate-2'-O-methyluridine-3'-phosphate
  modified_base 2: mod_base = OTHER; note = 2'-fluorouridine-3'-phosphate
  modified_base 3: mod_base = OTHER; note = 2'-O-methylguanosine-3'-phosphate
  modified_base 4: mod_base = OTHER; note = 2'-O-methylguanosine-3'-phosphate
  modified_base 6: mod_base = OTHER; note = 2'-O-methyladenosine-3'-phosphate
  modified_base 7: mod_base = OTHER; note = Thymidine-glycol nucleic acid (GNA) S-Isomer
  modified_base 8: mod_base = OTHER; note = 2'-O-methylguanosine-3'-phosphate
  modified_base 9: mod_base = OTHER; note = 2'-O-methylguanosine-3'-phosphate
  modified_base 10: mod_base = OTHER; note = 2'-O-methyluridine-3'-phosphate
  modified_base 11: mod_base = OTHER; note = 2'-O-methyladenosine-3'-phosphate
  modified_base 12: mod_base = OTHER; note = 2'-O-methyluridine-3'-phosphate
  modified_base 13: mod_base = OTHER; note = 2'-O-methyluridine-3'-phosphate
  modified_base 14: mod_base = OTHER; note = 2'-fluorouridine-3'-phosphate
  modified_base 15: mod_base = OTHER; note = 2'-O-methyladenosine-3'-phosphate
  modified_base 16: mod_base = OTHER; note = 2'-fluoroguanosine-3'-phosphate
  modified_base 17: mod_base = OTHER; note = 2'-O-methyluridine-3'-phosphate
  modified_base 18: mod_base = OTHER; note = 2'-O-methylcytidine-3'-phosphate
  modified_base 19: mod_base = OTHER; note = 2'-O-methylcytidine-3'-phosphate
  modified_base 20: mod_base = OTHER; note = 2'-O-methyluridine-3'-phosphate
  modified_base 21: mod_base = OTHER; note = 2'-O-methylcytidine-3'-phosphorothioate
  modified_base 22: mod_base = OTHER; note = 2'-O-methyluridine-3'-phosphorothioate
  modified_base 23: mod_base = OTHER; note = 2'-O-methylguanosine-3'-phosphate
  misc_feature 1..4: note = RNA
  misc_feature 5: note = DNA
  misc_feature 6: note = RNA
  misc_feature 7: note = DNA
  misc_feature 8..23: note = RNA
ttggaatggtatttagtcctctg

SEQ ID NO: 1126 - DNA, 23 bp, synthetic construct
  source 1..23: mol_type = other DNA
  modified_base 1: mod_base = OTHER; note = Vinyl-phosphonate-2'-O-methyluridine-3'-phosphate
  modified_base 3: mod_base = OTHER; note = 2'-O-methylguanosine-3'-phosphate
  modified_base 4: mod_base = OTHER; note = 2'-O-methylguanosine-3'-phosphate
  modified_base 6: mod_base = OTHER; note = 2'-O-methyladenosine-3'-phosphate
  modified_base 8: mod_base = OTHER; note = 2'-O-methylguanosine-3'-phosphate
  modified_base 9: mod_base = OTHER; note = 2'-O-methylguanosine-3'-phosphate
  modified_base 10: mod_base = OTHER; note = 2'-O-methyluridine-3'-phosphate
  modified_base 11: mod_base = OTHER; note = 2'-O-methyladenosine-3'-phosphate
  modified_base 13: mod_base = OTHER; note = 2'-O-methyluridine-3'-phosphate
  modified_base 14: mod_base = OTHER; note = 2'-fluorouridine-3'-phosphate
  modified_base 15: mod_base = OTHER; note = 2'-O-methyladenosine-3'-phosphate
  modified_base 16: mod_base = OTHER; note = 2'-O-methylguanosine-3'-phosphate
  modified_base 17: mod_base = OTHER; note = 2'-O-methyluridine-3'-phosphate
  modified_base 18: mod_base = OTHER; note = 2'-O-methylcytidine-3'-phosphate
  modified_base 19: mod_base = OTHER; note = 2'-O-methylcytidine-3'-phosphate
  modified_base 20: mod_base = OTHER; note = 2'-O-methyluridine-3'-phosphate
  modified_base 21: mod_base = OTHER; note = 2'-O-methylcytidine-3'-phosphorothioate
  modified_base 22: mod_base = OTHER; note = 2'-O-methyluridine-3'-phosphorothioate
  modified_base 23: mod_base = OTHER; note = 2'-O-methylguanosine-3'-phosphate
  misc_feature 1: note = RNA
  misc_feature 2: note = DNA
  misc_feature 3..4: note = RNA
  misc_feature 5: note = DNA
  misc_feature 6: note = RNA
  misc_feature 7: note = DNA
  misc_feature 8..11: note = RNA
  misc_feature 12: note = DNA
  misc_feature 13..23: note = RNA
ttggaatggtatttagtcctctg

SEQ ID NO: 1127 - DNA, 23 bp, synthetic construct
  source 1..23: mol_type = other DNA
  modified_base 1: mod_base = OTHER; note = Vinyl-phosphonate-2'-O-methyluridine-3'-phosphate
  modified_base 3: mod_base = OTHER; note = 2'-O-methyladenosine-3'-phosphate
  modified_base 4: mod_base = OTHER; note = 2'-O-methyluridine-3'-phosphate
  modified_base 6: mod_base = OTHER; note = 2'-O-methylguanosine-3'-phosphate
  modified_base 8: mod_base = OTHER; note = 2'-O-methyladenosine-3'-phosphate
  modified_base 9: mod_base = OTHER; note = 2'-O-methyluridine-3'-phosphate
  modified_base 10: mod_base = OTHER; note = 2'-O-methylguanosine-3'-phosphate
  modified_base 11: mod_base = OTHER; note = 2'-O-methylguanosine-3'-phosphate
  modified_base 13: mod_base = OTHER; note = 2'-O-methyladenosine-3'-phosphate
  modified_base 14: mod_base = OTHER; note = 2'-fluorouridine-3'-phosphate
  modified_base 15: mod_base = OTHER; note = 2'-O-methyluridine-3'-phosphate
  modified_base 16: mod_base = OTHER; note = 2'-O-methyluridine-3'-phosphate
  modified_base 17: mod_base = OTHER; note = 2'-O-methyladenosine-3'-phosphate
  modified_base 18: mod_base = OTHER; note = 2'-O-methylguanosine-3'-phosphate
  modified_base 19: mod_base = OTHER; note = 2'-O-methyluridine-3'-phosphate
  modified_base 20: mod_base = OTHER; note = 2'-O-methylcytidine-3'-phosphate
  modified_base 21: mod_base = OTHER; note = 2'-O-methylcytidine-3'-phosphorothioate
  modified_base 22: mod_base = OTHER; note = 2'-O-methyluridine-3'-phosphorothioate
  modified_base 23: mod_base = OTHER; note = 2'-O-methylcytidine-3'-phosphate
  misc_feature 1: note = RNA
  misc_feature 2: note = DNA
  misc_feature 3..4: note = RNA
  misc_feature 5: note = DNA
  misc_feature 6: note = RNA
  misc_feature 7: note = DNA
  misc_feature 8..11: note = RNA
  misc_feature 12: note = DNA
  misc_feature 13..23: note = RNA
taatggaatggtatttagtcctc

SEQ ID NO: 1128 - DNA, 23 bp, synthetic construct
  source 1..23: mol_type = other DNA
  modified_base 1: mod_base = OTHER; note = Vinyl-phosphonate-2'-O-methyluridine-3'-phosphate
  modified_base 3: mod_base = OTHER; note = 2'-O-methylcytidine-3'-phosphate
  modified_base 4: mod_base = OTHER; note = 2'-O-methyladenosine-3'-phosphate
  modified_base 6: mod_base = OTHER; note = 2'-O-methyluridine-3'-phosphate
  modified_base 8: mod_base = OTHER; note = 2'-O-methylguanosine-3'-phosphate
  modified_base 9: mod_base = OTHER; note = 2'-O-methyladenosine-3'-phosphate
  modified_base 10: mod_base = OTHER; note = 2'-O-methyladenosine-3'-phosphate
  modified_base 11: mod_base = OTHER; note = 2'-O-methyluridine-3'-phosphate
  modified_base 13: mod_base = OTHER; note = 2'-O-methylguanosine-3'-phosphate
  modified_base 14: mod_base = OTHER; note = 2'-fluorouridine-3'-phosphate
  modified_base 15: mod_base = OTHER; note = 2'-O-methyladenosine-3'-phosphate
  modified_base 16: mod_base = OTHER; note = 2'-O-methyluridine-3'-phosphate
  modified_base 17: mod_base = OTHER; note = 2'-O-methyluridine-3'-phosphate
  modified_base 18: mod_base = OTHER; note = 2'-O-methyluridine-3'-phosphate
  modified_base 19: mod_base = OTHER; note = 2'-O-methyladenosine-3'-phosphate
  modified_base 20: mod_base = OTHER; note = 2'-O-methylguanosine-3'-phosphate
  modified_base 21: mod_base = OTHER; note = 2'-O-methyluridine-3'-phosphorothioate
  modified_base 22: mod_base = OTHER; note = 2'-O-methylcytidine-3'-phosphorothioate
  modified_base 23: mod_base = OTHER; note = 2'-O-methylcytidine-3'-phosphate
  misc_feature 1: note = RNA
  misc_feature 2: note = DNA
  misc_feature 3..4: note = RNA
  misc_feature 5: note = DNA
  misc_feature 6: note = RNA
  misc_feature 7: note = DNA
  misc_feature 8..11: note = RNA
  misc_feature 12: note = DNA
  misc_feature 13..23: note = RNA
tacaatggaatggtatttagtcc

SEQ ID NO: 1129 - DNA, 23 bp, synthetic construct
  source 1..23: mol_type = other DNA
  modified_base 1: mod_base = OTHER; note = Vinyl-phosphonate-2'-O-methyluridine-3'-phosphate
  modified_base 3: mod_base = OTHER; note = 2'-O-methyladenosine-3'-phosphate
  modified_base 4: mod_base = OTHER; note = 2'-O-methylcytidine-3'-phosphate
  modified_base 6: mod_base = OTHER; note = 2'-O-methyladenosine-3'-phosphate
  modified_base 8: mod_base = OTHER; note = 2'-O-methylguanosine-3'-phosphate
  modified_base 9: mod_base = OTHER; note = 2'-O-methylguanosine-3'-phosphate
  modified_base 10: mod_base = OTHER; note = 2'-O-methyladenosine-3'-phosphate
  modified_base 11: mod_base = OTHER; note = 2'-O-methyladenosine-3'-phosphate
  modified_base 13: mod_base = OTHER; note = 2'-O-methylguanosine-3'-phosphate
  modified_base 14: mod_base = OTHER; note = 2'-fluoroguanosine-3'-phosphate
  modified_base 15: mod_base = OTHER; note = 2'-O-methyluridine-3'-phosphate
  modified_base 16: mod_base = OTHER; note = 2'-O-methyladenosine-3'-phosphate
  modified_base 17: mod_base = OTHER; note = 2'-O-methyluridine-3'-phosphate
  modified_base 18: mod_base = OTHER; note = 2'-O-methyluridine-3'-phosphate
  modified_base 19: mod_base = OTHER; note = 2'-O-methyluridine-3'-phosphate
  modified_base 20: mod_base = OTHER; note = 2'-O-methyladenosine-3'-phosphate
  modified_base 21: mod_base = OTHER; note = 2'-O-methylguanosine-3'-phosphorothioate
  modified_base 22: mod_base = OTHER; note = 2'-O-methyluridine-3'-phosphorothioate
  modified_base 23: mod_base = OTHER; note = 2'-O-methylcytidine-3'-phosphate
  misc_feature 1: note = RNA
  misc_feature 2: note = DNA
  misc_feature 3..4: note = RNA
  misc_feature 5: note = DNA
  misc_feature 6: note = RNA
  misc_feature 7: note = DNA
  misc_feature 8..11: note = RNA
  misc_feature 12: note = DNA
  misc_feature 13..23: note = RNA
taacaatggaatggtatttagtc

SEQ ID NO: 1130 - DNA, 23 bp, synthetic construct
  source 1..23: mol_type = other DNA
  modified_base 1: mod_base = OTHER; note = Vinyl-phosphonate-2'-O-methyluridine-3'-phosphate
  modified_base 3: mod_base = OTHER; note = 2'-O-methyladenosine-3'-phosphate
  modified_base 4: mod_base = OTHER; note = 2'-O-methyladenosine-3'-phosphate
  modified_base 6: mod_base = OTHER; note = 2'-O-methyladenosine-3'-phosphate
  modified_base 8: mod_base = OTHER; note = 2'-O-methyluridine-3'-phosphate
  modified_base 9: mod_base = OTHER; note = 2'-O-methylguanosine-3'-phosphate
  modified_base 10: mod_base = OTHER; note = 2'-O-methylguanosine-3'-phosphate
  modified_base 11: mod_base = OTHER; note = 2'-O-methyladenosine-3'-phosphate
  modified_base 13: mod_base = OTHER; note = 2'-O-methyluridine-3'-phosphate
  modified_base 14: mod_base = OTHER; note = 2'-fluoroguanosine-3'-phosphate
  modified_base 15: mod_base = OTHER; note = 2'-O-methylguanosine-3'-phosphate
  modified_base 16: mod_base = OTHER; note = 2'-O-methyluridine-3'-phosphate
  modified_base 17: mod_base = OTHER; note = 2'-O-methyladenosine-3'-phosphate
  modified_base 18: mod_base = OTHER; note = 2'-O-methyluridine-3'-phosphate
  modified_base 19: mod_base = OTHER; note = 2'-O-methyluridine-3'-phosphate
  modified_base 20: mod_base = OTHER; note = 2'-O-methyluridine-3'-phosphate
  modified_base 21: mod_base = OTHER; note = 2'-O-methyladenosine-3'-phosphorothioate
  modified_base 22: mod_base = OTHER; note = 2'-O-methylguanosine-3'-phosphorothioate
  modified_base 23: mod_base = OTHER; note = 2'-O-methyluridine-3'-phosphate
  misc_feature 1: note = RNA
  misc_feature 2: note = DNA
  misc_feature 3..4: note = RNA
  misc_feature 5: note = DNA
  misc_feature 6: note = RNA
  misc_feature 7: note = DNA
  misc_feature 8..11: note = RNA
  misc_feature 12: note = DNA
  misc_feature 13..23: note = RNA
taaacaatggaatggtatttagt

SEQ ID NO: 1131 - DNA, 23 bp, synthetic construct
  source 1..23: mol_type = other DNA
  modified_base 1: mod_base = OTHER; note = Vinyl-phosphonate-2'-O-methyluridine-3'-phosphate
  modified_base 3: mod_base = OTHER; note = 2'-O-methyladenosine-3'-phosphate
  modified_base 4: mod_base = OTHER; note = 2'-O-methyladenosine-3'-phosphate
  modified_base 6: mod_base = OTHER; note = 2'-O-methylcytidine-3'-phosphate
  modified_base 8: mod_base = OTHER; note = 2'-O-methyladenosine-3'-phosphate
  modified_base 9: mod_base = OTHER; note = 2'-O-methyluridine-3'-phosphate
  modified_base 10: mod_base = OTHER; note = 2'-O-methylguanosine-3'-phosphate
  modified_base 11: mod_base = OTHER; note = 2'-O-methylguanosine-3'-phosphate
  modified_base 13: mod_base = OTHER; note = 2'-O-methyladenosine-3'-phosphate
  modified_base 14: mod_base = OTHER; note = 2'-fluorouridine-3'-phosphate
  modified_base 15: mod_base = OTHER; note = 2'-O-methylguanosine-3'-phosphate
  modified_base 16: mod_base = OTHER; note = 2'-O-methylguanosine-3'-phosphate
  modified_base 17: mod_base = OTHER; note = 2'-O-methyluridine-3'-phosphate
  modified_base 18: mod_base = OTHER; note = 2'-O-methyladenosine-3'-phosphate
  modified_base 19: mod_base = OTHER; note = 2'-O-methyluridine-3'-phosphate
  modified_base 20: mod_base = OTHER; note = 2'-O-methyluridine-3'-phosphate
  modified_base 21: mod_base = OTHER; note = 2'-O-methyluridine-3'-phosphorothioate
  modified_base 22: mod_base = OTHER; note = 2'-O-methyladenosine-3'-phosphorothioate
  modified_base 23: mod_base = OTHER; note = 2'-O-methylguanosine-3'-phosphate
  misc_feature 1: note = RNA
  misc_feature 2: note = DNA
  misc_feature 3..4: note = RNA
  misc_feature 5: note = DNA
  misc_feature 6: note = RNA
  misc_feature 7: note = DNA
  misc_feature 8..11: note = RNA
  misc_feature 12: note = DNA
  misc_feature 13..23: note = RNA
tcaaacaatggaatggtatttag

SEQ ID NO: 1132 - DNA, 23 bp, synthetic construct
  source 1..23: mol_type = other DNA
  modified_base 1: mod_base = OTHER; note = Vinyl-phosphonate-2'-O-methyluridine-3'-phosphate
  modified_base 3: mod_base = OTHER; note = 2'-O-methylcytidine-3'-phosphate
  modified_base 4: mod_base = OTHER; note = 2'-O-methyladenosine-3'-phosphate
  modified_base 6: mod_base = OTHER; note = 2'-O-methyladenosine-3'-phosphate
  modified_base 8: mod_base = OTHER; note = 2'-O-methyladenosine-3'-phosphate
  modified_base 9: mod_base = OTHER; note = 2'-O-methyladenosine-3'-phosphate
  modified_base 10: mod_base = OTHER; note = 2'-O-methyluridine-3'-phosphate
  modified_base 11: mod_base = OTHER; note = 2'-O-methylguanosine-3'-phosphate
  modified_base 13: mod_base = OTHER; note = 2'-O-methyladenosine-3'-phosphate
  modified_base 14: mod_base = OTHER; note = 2'-fluoroadenosine-3'-phosphate
  modified_base 15: mod_base = OTHER; note = 2'-O-methyluridine-3'-phosphate
  modified_base 16: mod_base = OTHER; note = 2'-O-methylguanosine-3'-phosphate
  modified_base 17: mod_base = OTHER; note = 2'-O-methylguanosine-3'-phosphate
  modified_base 18: mod_base = OTHER; note = 2'-O-methyluridine-3'-phosphate
  modified_base 19: mod_base = OTHER; note = 2'-O-methyladenosine-3'-phosphate
  modified_base 20: mod_base = OTHER; note = 2'-O-methyluridine-3'-phosphate
  modified_base 21: mod_base = OTHER; note = 2'-O-methyluridine-3'-phosphorothioate
  modified_base 22: mod_base = OTHER; note = 2'-O-methyluridine-3'-phosphorothioate
  modified_base 23: mod_base = OTHER; note = 2'-O-methyladenosine-3'-phosphate
  misc_feature 1: note = RNA
  misc_feature 2: note = DNA
  misc_feature 3..4: note = RNA
  misc_feature 5: note = DNA
  misc_feature 6: note = RNA
  misc_feature 7: note = DNA
  misc_feature 8..11: note = RNA
  misc_feature 12: note = DNA
  misc_feature 13..23: note = RNA
tacaaacaatggaatggtattta

SEQ ID NO: 1133 - DNA, 23 bp, synthetic construct
  source 1..23: mol_type = other DNA
  modified_base 1: mod_base = OTHER; note = Vinyl-phosphonate-2'-O-methyluridine-3'-phosphate
  modified_base 3: mod_base = OTHER; note = 2'-O-methyladenosine-3'-phosphate
  modified_base 4: mod_base = OTHER; note = 2'-O-methylcytidine-3'-phosphate
  modified_base 6: mod_base = OTHER; note = 2'-O-methyladenosine-3'-phosphate
  modified_base 8: mod_base = OTHER; note = 2'-O-methylcytidine-3'-phosphate
  modified_base 9: mod_base = OTHER; note = 2'-O-methyladenosine-3'-phosphate
  modified_base 10: mod_base = OTHER; note = 2'-O-methyladenosine-3'-phosphate
  modified_base 11: mod_base = OTHER; note = 2'-O-methyluridine-3'-phosphate
  modified_base 13: mod_base = OTHER; note = 2'-O-methylguanosine-3'-phosphate
  modified_base 14: mod_base = OTHER; note = 2'-fluoroadenosine-3'-phosphate
  modified_base 15: mod_base = OTHER; note = 2'-O-methyladenosine-3'-phosphate
  modified_base 16: mod_base = OTHER; note = 2'-O-methyluridine-3'-phosphate
  modified_base 17: mod_base = OTHER; note = 2'-O-methylguanosine-3'-phosphate
  modified_base 18: mod_base = OTHER; note = 2'-O-methylguanosine-3'-phosphate
  modified_base 19: mod_base = OTHER; note = 2'-O-methyluridine-3'-phosphate
  modified_base 20: mod_base = OTHER; note = 2'-O-methyladenosine-3'-phosphate
  modified_base 21: mod_base = OTHER; note = 2'-O-methyluridine-3'-phosphorothioate
  modified_base 22: mod_base = OTHER; note = 2'-O-methyluridine-3'-phosphorothioate
  modified_base 23: mod_base = OTHER; note = 2'-O-methyluridine-3'-phosphate
  misc_feature 1: note = RNA
  misc_feature 2: note = DNA
  misc_feature 3..4: note = RNA
  misc_feature 5: note = DNA
  misc_feature 6: note = RNA
  misc_feature 7: note = DNA
  misc_feature 8..11: note = RNA
  misc_feature 12: note = DNA
  misc_feature 13..23: note = RNA
tcacaaacaatggaatggtattt

SEQ ID NO: 1134 - DNA, 23 bp, synthetic construct
  source 1..23: mol_type = other DNA
  modified_base 1: mod_base = OTHER; note = Vinyl-phosphonate-2'-O-methyluridine-3'-phosphate
  modified_base 3: mod_base = OTHER; note = 2'-O-methylcytidine-3'-phosphate
  modified_base 4: mod_base = OTHER; note = 2'-O-methyladenosine-3'-phosphate
  modified_base 6: mod_base = OTHER; note = 2'-O-methyladenosine-3'-phosphate
  modified_base 8: mod_base = OTHER; note = 2'-O-methyladenosine-3'-phosphate
  modified_base 9: mod_base = OTHER; note = 2'-O-methylcytidine-3'-phosphate
  modified_base 10: mod_base = OTHER; note = 2'-O-methyladenosine-3'-phosphate
  modified_base 11: mod_base = OTHER; note = 2'-O-methyladenosine-3'-phosphate
  modified_base 13: mod_base = OTHER; note = 2'-O-methylguanosine-3'-phosphate
  modified_base 14: mod_base = OTHER; note = 2'-fluoroguanosine-3'-phosphate
  modified_base 15: mod_base = OTHER; note = 2'-O-methyladenosine-3'-phosphate
  modified_base 16: mod_base = OTHER; note = 2'-O-methyladenosine-3'-phosphate
  modified_base 17: mod_base = OTHER; note = 2'-O-methyluridine-3'-phosphate
  modified_base 18: mod_base = OTHER; note = 2'-O-methylguanosine-3'-phosphate
  modified_base 19: mod_base = OTHER; note = 2'-O-methylguanosine-3'-phosphate
  modified_base 20: mod_base = OTHER; note = 2'-O-methyluridine-3'-phosphate
  modified_base 21: mod_base = OTHER; note = 2'-O-methyladenosine-3'-phosphorothioate
  modified_base 22: mod_base = OTHER; note = 2'-O-methyluridine-3'-phosphorothioate
  modified_base 23: mod_base = OTHER; note = 2'-O-methyluridine-3'-phosphate
  misc_feature 1: note = RNA
  misc_feature 2: note = DNA
  misc_feature 3..4: note = RNA
  misc_feature 5: note = DNA
  misc_feature 6: note = RNA
  misc_feature 7: note = DNA
  misc_feature 8..11: note = RNA
  misc_feature 12: note = DNA
  misc_feature 13..23: note = RNA
tgcacaaacaatggaatggtatt

SEQ ID NO: 1135 - DNA, 23 bp, synthetic construct
  source 1..23: mol_type = other DNA
  modified_base 1: mod_base = OTHER; note = Vinyl-phosphonate-2'-O-methyluridine-3'-phosphate
  modified_base 3: mod_base = OTHER; note = 2'-O-methylguanosine-3'-phosphate
  modified_base 4: mod_base = OTHER; note = 2'-O-methylcytidine-3'-phosphate
  modified_base 6: mod_base = OTHER; note = 2'-O-methylcytidine-3'-phosphate
  modified_base 8: mod_base = OTHER; note = 2'-O-methyladenosine-3'-phosphate
  modified_base 9: mod_base = OTHER; note = 2'-O-methyladenosine-3'-phosphate
  modified_base 10: mod_base = OTHER; note = 2'-O-methylcytidine-3'-phosphate
  modified_base 11: mod_base = OTHER; note = 2'-O-methyladenosine-3'-phosphate
  modified_base 13: mod_base = OTHER; note = 2'-O-methyluridine-3'-phosphate
  modified_base 14: mod_base = OTHER; note = 2'-fluoroguanosine-3'-phosphate
  modified_base 15: mod_base = OTHER; note = 2'-O-methylguanosine-3'-phosphate
  modified_base 16: mod_base = OTHER; note = 2'-O-methyladenosine-3'-phosphate
  modified_base 17: mod_base = OTHER; note = 2'-O-methyladenosine-3'-phosphate
  modified_base 18: mod_base = OTHER; note = 2'-O-methyluridine-3'-phosphate
  modified_base 19: mod_base = OTHER; note = 2'-O-methylguanosine-3'-phosphate
  modified_base 20: mod_base = OTHER; note = 2'-O-methylguanosine-3'-phosphate
  modified_base 21: mod_base = OTHER; note = 2'-O-methyluridine-3'-phosphorothioate
  modified_base 22: mod_base = OTHER; note = 2'-O-methyladenosine-3'-phosphorothioate
  modified_base 23: mod_base = OTHER; note = 2'-O-methyluridine-3'-phosphate
  misc_feature 1: note = RNA
  misc_feature 2: note = DNA
  misc_feature 3..4: note = RNA
  misc_feature 5: note = DNA
  misc_feature 6: note = RNA
  misc_feature 7: note = DNA
  misc_feature 8..11: note = RNA
  misc_feature 12: note = DNA
  misc_feature 13..23: note = RNA
ttgcacaaacaatggaatggtat

SEQ ID NO: 1136 - DNA, 23 bp, synthetic construct
  source 1..23: mol_type = other DNA
  modified_base 1: mod_base = OTHER; note = Vinyl-phosphonate-2'-O-methyluridine-3'-phosphate
  modified_base 2: mod_base = OTHER; note = 2'-fluorouridine-3'-phosphate
  modified_base 3: mod_base = OTHER; note = 2'-O-methylguanosine-3'-phosphate
  modified_base 4: mod_base = OTHER; note = 2'-O-methylcytidine-3'-phosphate
  modified_base 6: mod_base = OTHER; note = 2'-O-methylcytidine-3'-phosphate
  modified_base 7: mod_base = OTHER; note = Adenosine-glycol nucleic acid (GNA)
  modified_base 8: mod_base = OTHER; note = 2'-O-methyladenosine-3'-phosphate
  modified_base 9: mod_base = OTHER; note = 2'-O-methyladenosine-3'-phosphate
  modified_base 10: mod_base = OTHER; note = 2'-O-methylcytidine-3'-phosphate
  modified_base 11: mod_base = OTHER; note = 2'-O-methyladenosine-3'-phosphate
  modified_base 12: mod_base = OTHER; note = 2'-O-methyladenosine-3'-phosphate
  modified_base 13: mod_base = OTHER; note = 2'-O-methyluridine-3'-phosphate
  modified_base 14: mod_base = OTHER; note = 2'-fluoroguanosine-3'-phosphate
  modified_base 15: mod_base = OTHER; note = 2'-O-methylguanosine-3'-phosphate
  modified_base 16: mod_base = OTHER; note = 2'-fluoroadenosine-3'-phosphate
  modified_base 17: mod_base = OTHER; note = 2'-O-methyladenosine-3'-phosphate
  modified_base 18: mod_base = OTHER; note = 2'-O-methyluridine-3'-phosphate
  modified_base 19: mod_base = OTHER; note = 2'-O-methylguanosine-3'-phosphate
  modified_base 20: mod_base = OTHER; note = 2'-O-methylguanosine-3'-phosphate
  modified_base 21: mod_base = OTHER; note = 2'-O-methyluridine-3'-phosphorothioate
  modified_base 22: mod_base = OTHER; note = 2'-O-methyladenosine-3'-phosphorothioate
  modified_base 23: mod_base = OTHER; note = 2'-O-methyluridine-3'-phosphate
  misc_feature 1..4: note = RNA
  misc_feature 5: note = DNA
  misc_feature 6..23: note = RNA
ttgcacaaacaatggaatggtat

SEQ ID NO: 1137 - DNA, 23 bp, synthetic construct
  source 1..23: mol_type = other DNA
  modified_base 1: mod_base = OTHER; note = Vinyl-phosphonate-2'-O-methyluridine-3'-phosphate
  modified_base 3: mod_base = OTHER; note = 2'-O-methyluridine-3'-phosphate
  modified_base 4: mod_base = OTHER; note = 2'-O-methylguanosine-3'-phosphate
  modified_base 6: mod_base = OTHER; note = 2'-O-methyladenosine-3'-phosphate
  modified_base 8: mod_base = OTHER; note = 2'-O-methyladenosine-3'-phosphate
  modified_base 9: mod_base = OTHER; note = 2'-O-methyladenosine-3'-phosphate
  modified_base 10: mod_base = OTHER; note = 2'-O-methyladenosine-3'-phosphate
  modified_base 11: mod_base = OTHER; note = 2'-O-methylcytidine-3'-phosphate
  modified_base 13: mod_base = OTHER; note = 2'-O-methyladenosine-3'-phosphate
  modified_base 14: mod_base = OTHER; note = 2'-fluorouridine-3'-phosphate
  modified_base 15: mod_base = OTHER; note = 2'-O-methylguanosine-3'-phosphate
  modified_base 16: mod_base = OTHER; note = 2'-O-methylguanosine-3'-phosphate
  modified_base 17: mod_base = OTHER; note = 2'-O-methyladenosine-3'-phosphate
  modified_base 18: mod_base = OTHER; note = 2'-O-methyladenosine-3'-phosphate
  modified_base 19: mod_base = OTHER; note = 2'-O-methyluridine-3'-phosphate
  modified_base 20: mod_base = OTHER; note = 2'-O-methylguanosine-3'-phosphate
  modified_base 21: mod_base = OTHER; note = 2'-O-methylguanosine-3'-phosphorothioate
  modified_base 22: mod_base = OTHER; note = 2'-O-methyluridine-3'-phosphorothioate
  modified_base 23: mod_base = OTHER; note = 2'-O-methyladenosine-3'-phosphate
  misc_feature 1: note = RNA
  misc_feature 2: note = DNA
  misc_feature 3..4: note = RNA
  misc_feature 5: note = DNA
  misc_feature 6: note = RNA
  misc_feature 7: note = DNA
  misc_feature 8..11: note = RNA
  misc_feature 12: note = DNA
  misc_feature 13..23: note = RNA
tctgcacaaacaatggaatggta

SEQ ID NO: 1138 - DNA, 23 bp, synthetic construct
  source 1..23: mol_type = other DNA
  modified_base 1: mod_base = OTHER; note = Vinyl-phosphonate-2'-O-methyluridine-3'-phosphate
  modified_base 2: mod_base = OTHER; note = 2'-fluoroguanosine-3'-phosphate
  modified_base 3: mod_base = OTHER; note = 2'-O-methylcytidine-3'-phosphate
  modified_base 4: mod_base = OTHER; note = 2'-O-methyluridine-3'-phosphate
  modified_base 6: mod_base = OTHER; note = 2'-O-methylcytidine-3'-phosphate
  modified_base 7: mod_base = OTHER; note = Adenosine-glycol nucleic acid (GNA)
  modified_base 8: mod_base = OTHER; note = 2'-O-methylcytidine-3'-phosphate
  modified_base 9: mod_base = OTHER; note = 2'-O-methyladenosine-3'-phosphate
  modified_base 10: mod_base = OTHER; note = 2'-O-methyladenosine-3'-phosphate
  modified_base 11: mod_base = OTHER; note = 2'-O-methyladenosine-3'-phosphate
  modified_base 12: mod_base = OTHER; note = 2'-O-methylcytidine-3'-phosphate
  modified_base 13: mod_base = OTHER; note = 2'-O-methyladenosine-3'-phosphate
  modified_base 14: mod_base = OTHER; note = 2'-fluoroadenosine-3'-phosphate
  modified_base 15: mod_base = OTHER; note = 2'-O-methyluridine-3'-phosphate
  modified_base 16: mod_base = OTHER; note = 2'-fluoroguanosine-3'-phosphate
  modified_base 17: mod_base = OTHER; note = 2'-O-methylguanosine-3'-phosphate
  modified_base 18: mod_base = OTHER; note = 2'-O-methyladenosine-3'-phosphate
  modified_base 19: mod_base = OTHER; note = 2'-O-methyladenosine-3'-phosphate
  modified_base 20: mod_base = OTHER; note = 2'-O-methyluridine-3'-phosphate
  modified_base 21: mod_base = OTHER; note = 2'-O-methylguanosine-3'-phosphorothioate
  modified_base 22: mod_base = OTHER; note = 2'-O-methylguanosine-3'-phosphorothioate
  modified_base 23: mod_base = OTHER; note = 2'-O-methyluridine-3'-phosphate
  misc_feature 1..4: note = RNA
  misc_feature 5: note = DNA
  misc_feature 6..23: note = RNA
tgctgcacaaacaatggaatggt

SEQ ID NO: 1139 - DNA, 23 bp, synthetic construct
  source 1..23: mol_type = other DNA
  modified_base 1: mod_base = OTHER; note = Vinyl-phosphonate-2'-O-methyluridine-3'-phosphate
  modified_base 2: mod_base = OTHER; note = 2'-fluoroguanosine-3'-phosphate
  modified_base 3: mod_base = OTHER; note = 2'-O-methylcytidine-3'-phosphate
  modified_base 4: mod_base = OTHER; note = 2'-O-methyladenosine-3'-phosphate
  modified_base 6: mod_base = OTHER; note = 2'-O-methylcytidine-3'-phosphate
  modified_base 7: mod_base = OTHER; note = Thymidine-glycol nucleic acid (GNA) S-Isomer
  modified_base 8: mod_base = OTHER; note = 2'-O-methylguanosine-3'-phosphate
  modified_base 9: mod_base = OTHER; note = 2'-O-methylcytidine-3'-phosphate
  modified_base 10: mod_base = OTHER; note = 2'-O-methyladenosine-3'-phosphate
  modified_base 11: mod_base = OTHER; note = 2'-O-methylcytidine-3'-phosphate
  modified_base 12: mod_base = OTHER; note = 2'-O-methyladenosine-3'-phosphate
  modified_base 13: mod_base = OTHER; note = 2'-O-methyladenosine-3'-phosphate
  modified_base 14: mod_base = OTHER; note = 2'-fluoroadenosine-3'-phosphate
  modified_base 15: mod_base = OTHER; note = 2'-O-methylcytidine-3'-phosphate
  modified_base 16: mod_base = OTHER; note = 2'-fluoroadenosine-3'-phosphate
  modified_base 17: mod_base = OTHER; note = 2'-O-methyladenosine-3'-phosphate
  modified_base 18: mod_base = OTHER; note = 2'-O-methyluridine-3'-phosphate
  modified_base 19: mod_base = OTHER; note = 2'-O-methylguanosine-3'-phosphate
  modified_base 20: mod_base = OTHER; note = 2'-O-methylguanosine-3'-phosphate
  modified_base 21: mod_base = OTHER; note = 2'-O-methyladenosine-3'-phosphorothioate
  modified_base 22: mod_base = OTHER; note = 2'-O-methyladenosine-3'-phosphorothioate
  modified_base 23: mod_base = OTHER; note = 2'-O-methyluridine-3'-phosphate
  misc_feature 1..4: note = RNA
  misc_feature 5: note = DNA
  misc_feature 6: note = RNA
  misc_feature 7: note = DNA
  misc_feature 8..23: note = RNA
tgcagctgcacaaacaatggaat

SEQ ID NO: 1140 - DNA, 23 bp, synthetic construct
  source 1..23: mol_type = other DNA
  modified_base 1: mod_base = OTHER; note = Vinyl-phosphonate-2'-O-methyluridine-3'-phosphate
  modified_base 3: mod_base = OTHER; note = 2'-O-methyladenosine-3'-phosphate
  modified_base 4: mod_base = OTHER; note = 2'-O-methyluridine-3'-phosphate
  modified_base 6: mod_base = OTHER; note = 2'-O-methyladenosine-3'-phosphate
  modified_base 8: mod_base = OTHER; note = 2'-O-methylguanosine-3'-phosphate
  modified_base 9: mod_base = OTHER; note = 2'-O-methylcytidine-3'-phosphate
  modified_base 10: mod_base = OTHER; note = 2'-O-methyladenosine-3'-phosphate
  modified_base 11: mod_base = OTHER; note = 2'-O-methylguanosine-3'-phosphate
  modified_base 13: mod_base = OTHER; note = 2'-O-methyluridine-3'-phosphate
  modified_base 14: mod_base = OTHER; note = 2'-fluoroguanosine-3'-phosphate
  modified_base 15: mod_base = OTHER; note = 2'-O-methylcytidine-3'-phosphate
  modified_base 16: mod_base = OTHER; note = 2'-O-methyladenosine-3'-phosphate
  modified_base 17: mod_base = OTHER; note = 2'-O-methylcytidine-3'-phosphate
  modified_base 18: mod_base = OTHER; note = 2'-O-methyladenosine-3'-phosphate
  modified_base 19: mod_base = OTHER; note = 2'-O-methyladenosine-3'-phosphate
  modified_base 20: mod_base = OTHER; note = 2'-O-methyladenosine-3'-phosphate
  modified_base 21: mod_base = OTHER; note = 2'-O-methylcytidine-3'-phosphorothioate
  modified_base 22: mod_base = OTHER; note = 2'-O-methyladenosine-3'-phosphorothioate
  modified_base 23: mod_base = OTHER; note = 2'-O-methyladenosine-3'-phosphate
  misc_feature 1: note = RNA
  misc_feature 2: note = DNA
  misc_feature 3..4: note = RNA
  misc_feature 5: note = DNA
  misc_feature 6: note = RNA
  misc_feature 7: note = DNA
  misc_feature 8..11: note = RNA
  misc_feature 12: note = DNA
  misc_feature 13..23: note = RNA
taataaagcagctgcacaaacaa

SEQ ID NO: 1141 - DNA, 23 bp, synthetic construct
  source 1..23: mol_type = other DNA
  modified_base 1: mod_base = OTHER; note = Vinyl-phosphonate-2'-O-methyluridine-3'-phosphate
  modified_base 3: mod_base = OTHER; note = 2'-O-methyladenosine-3'-phosphate
  modified_base 4: mod_base = OTHER; note = 2'-O-methylguanosine-3'-phosphate
  modified_base 6: mod_base = OTHER; note = 2'-O-methyladenosine-3'-phosphate
  modified_base 8: mod_base = OTHER; note = 2'-O-methylcytidine-3'-phosphate
  modified_base 9: mod_base = OTHER; note = 2'-O-methyluridine-3'-phosphate
  modified_base 10: mod_base = OTHER; note = 2'-O-methylcytidine-3'-phosphate
  modified_base 11: mod_base = OTHER; note = 2'-O-methyluridine-3'-phosphate
  modified_base 13: mod_base = OTHER; note = 2'-O-methyluridine-3'-phosphate
  modified_base 14: mod_base = OTHER; note = 2'-fluorocytidine-3'-phosphate
  modified_base 15: mod_base = OTHER; note = 2'-O-methyladenosine-3'-phosphate
  modified_base 16: mod_base = OTHER; note = 2'-O-methylguanosine-3'-phosphate
  modified_base 17: mod_base = OTHER; note = 2'-O-methyladenosine-3'-phosphate
  modified_base 18: mod_base = OTHER; note = 2'-O-methylguanosine-3'-phosphate
  modified_base 19: mod_base = OTHER; note = 2'-O-methylguanosine-3'-phosphate
  modified_base 20: mod_base = OTHER; note = 2'-O-methyladenosine-3'-phosphate
  modified_base 21: mod_base = OTHER; note = 2'-O-methylguanosine-3'-phosphorothioate
  modified_base 22: mod_base = OTHER; note = 2'-O-methylcytidine-3'-phosphorothioate
  modified_base 23: mod_base = OTHER; note = 2'-O-methyluridine-3'-phosphate
  misc_feature 1: note = RNA
  misc_feature 2: note = DNA
  misc_feature 3..4: note = RNA
  misc_feature 5: note = DNA
  misc_feature 6: note = RNA
  misc_feature 7: note = DNA
  misc_feature 8..11: note = RNA
  misc_feature 12: note = DNA
  misc_feature 13..23: note = RNA
taagtaactctgtcagaggagct

SEQ ID NO: 1142 - DNA, 23 bp, synthetic construct
  source 1..23: mol_type = other DNA
  modified_base 1: mod_base = OTHER; note = Vinyl-phosphonate-2'-O-methyluridine-3'-phosphate
  modified_base 2: mod_base = OTHER; note = 2'-fluorouridine-3'-phosphate
  modified_base 3: mod_base = OTHER; note = 2'-O-methyladenosine-3'-phosphate
  modified_base 4: mod_base = OTHER; note = 2'-O-methylguanosine-3'-phosphate
  modified_base 6: mod_base = OTHER; note = 2'-O-methylguanosine-3'-phosphate
  modified_base 7: mod_base = OTHER; note = Thymidine-glycol nucleic acid (GNA) S-Isomer
  modified_base 8: mod_base = OTHER; note = 2'-O-methylguanosine-3'-phosphate
  modified_base 9: mod_base = OTHER; note = 2'-O-methyladenosine-3'-phosphate
  modified_base 10: mod_base = OTHER; note = 2'-O-methyladenosine-3'-phosphate
  modified_base 11: mod_base = OTHER; note = 2'-O-methylguanosine-3'-phosphate
  modified_base 12: mod_base = OTHER; note = 2'-O-methyluridine-3'-phosphate
  modified_base 13: mod_base = OTHER; note = 2'-O-methyladenosine-3'-phosphate
  modified_base 14: mod_base = OTHER; note = 2'-fluoroadenosine-3'-phosphate
  modified_base 15: mod_base = OTHER; note = 2'-O-methylcytidine-3'-phosphate
  modified_base 16: mod_base = OTHER; note = 2'-fluorouridine-3'-phosphate
  modified_base 17: mod_base = OTHER; note = 2'-O-methylcytidine-3'-phosphate
  modified_base 18: mod_base = OTHER; note = 2'-O-methyluridine-3'-phosphate
  modified_base 19: mod_base = OTHER; note = 2'-O-methylguanosine-3'-phosphate
  modified_base 20: mod_base = OTHER; note = 2'-O-methyluridine-3'-phosphate
  modified_base 21: mod_base = OTHER; note = 2'-O-methylcytidine-3'-phosphorothioate
  modified_base 22: mod_base = OTHER; note = 2'-O-methyladenosine-3'-phosphorothioate
  modified_base 23: mod_base = OTHER; note = 2'-O-methylguanosine-3'-phosphate
  misc_feature 1..4: note = RNA
  misc_feature 5: note = DNA
  misc_feature 6: note = RNA
  misc_feature 7: note = DNA
  misc_feature 8..23: note = RNA
ttagagtgaagtaactctgtcag

SEQ ID NO: 1143 - DNA, 23 bp, synthetic construct
  source 1..23: mol_type = other DNA
  modified_base 1: mod_base = OTHER; note = Vinyl-phosphonate-2'-O-methyluridine-3'-phosphate
  modified_base 2: mod_base = OTHER; note = 2'-fluoroadenosine-3'-phosphate
  modified_base 3: mod_base = OTHER; note = 2'-O-methyluridine-3'-phosphate
  modified_base 4: mod_base = OTHER; note = 2'-O-methyluridine-3'-phosphate
  modified_base 6: mod_base = OTHER; note = 2'-O-methylcytidine-3'-phosphate
  modified_base 7: mod_base = OTHER; note = Thymidine-glycol nucleic acid (GNA) S-Isomer
  modified_base 8: mod_base = OTHER; note = 2'-O-methyladenosine-3'-phosphate
  modified_base 9: mod_base = OTHER; note = 2'-O-methylguanosine-3'-phosphate
  modified_base 10: mod_base = OTHER; note = 2'-O-methyladenosine-3'-phosphate
  modified_base 11: mod_base = OTHER; note = 2'-O-methylguanosine-3'-phosphate
  modified_base 12: mod_base = OTHER; note = 2'-O-methyluridine-3'-phosphate
  modified_base 13: mod_base = OTHER; note = 2'-O-methylguanosine-3'-phosphate
  modified_base 14: mod_base = OTHER; note = 2'-fluoroadenosine-3'-phosphate
  modified_base 15: mod_base = OTHER; note = 2'-O-methyladenosine-3'-phosphate
  modified_base 16: mod_base = OTHER; note = 2'-fluoroguanosine-3'-phosphate
  modified_base 17: mod_base = OTHER; note = 2'-O-methyluridine-3'-phosphate
  modified_base 18: mod_base = OTHER; note = 2'-O-methyladenosine-3'-phosphate
  modified_base 19: mod_base = OTHER; note = 2'-O-methyladenosine-3'-phosphate
  modified_base 20: mod_base = OTHER; note = 2'-O-methylcytidine-3'-phosphate
  modified_base 21: mod_base = OTHER; note = 2'-O-methyluridine-3'-phosphorothioate
  modified_base 22: mod_base = OTHER; note = 2'-O-methylcytidine-3'-phosphorothioate
  modified_base 23: mod_base = OTHER; note = 2'-O-methyluridine-3'-phosphate
  misc_feature 1..4: note = RNA
  misc_feature 5: note = DNA
  misc_feature 6: note = RNA
  misc_feature 7: note = DNA
  misc_feature 8..23: note = RNA
tattcctagagtgaagtaactct

SEQ ID NO: 1144 - DNA, 23 bp, synthetic construct
  source 1..23: mol_type = other DNA
  modified_base 1: mod_base = OTHER; note = Vinyl-phosphonate-2'-O-methyluridine-3'-phosphate
  modified_base 2: mod_base = OTHER; note = 2'-fluorouridine-3'-phosphate
  modified_base 3: mod_base = OTHER; note = 2'-O-methyladenosine-3'-phosphate
  modified_base 4: mod_base = OTHER; note = 2'-O-methyladenosine-3'-phosphate
  modified_base 6: mod_base = OTHER; note = 2'-O-methylcytidine-3'-phosphate
  modified_base 7: mod_base = OTHER; note = Thymidine-glycol nucleic acid (GNA) S-Isomer
  modified_base 8: mod_base = OTHER; note = 2'-O-methyluridine-3'-phosphate
  modified_base 9: mod_base = OTHER; note = 2'-O-methylguanosine-3'-phosphate
  modified_base 10: mod_base = OTHER; note = 2'-O-methyluridine-3'-phosphate
  modified_base 11: mod_base = OTHER; note = 2'-O-methylguanosine-3'-phosphate
  modified_base 12: mod_base = OTHER; note = 2'-O-methylguanosine-3'-phosphate
  modified_base 13: mod_base = OTHER; note = 2'-O-methylcytidine-3'-phosphate
  modified_base 14: mod_base = OTHER; note = 2'-fluorouridine-3'-phosphate
  modified_base 15: mod_base = OTHER; note = 2'-O-methyluridine-3'-phosphate
  modified_base 16: mod_base = OTHER; note = 2'-fluoroguanosine-3'-phosphate
  modified_base 17: mod_base = OTHER; note = 2'-O-methyluridine-3'-phosphate
  modified_base 18: mod_base = OTHER; note = 2'-O-methylcytidine-3'-phosphate
  modified_base 19: mod_base = OTHER; note = 2'-O-methylcytidine-3'-phosphate
  modified_base 20: mod_base = OTHER; note = 2'-O-methyluridine-3'-phosphate
  modified_base 21: mod_base = OTHER; note = 2'-O-methylcytidine-3'-phosphorothioate
  modified_base 22: mod_base = OTHER; note = 2'-O-methyladenosine-3'-phosphorothioate
  modified_base 23: mod_base = OTHER; note = 2'-O-methylguanosine-3'-phosphate
  misc_feature 1..4: note = RNA
  misc_feature 5: note = DNA
  misc_feature 6: note = RNA
  misc_feature 7: note = DNA
  misc_feature 8..23: note = RNA
ttaatcttgtggcttgtcctcag

SEQ ID NO: 1145 - DNA, 23 bp, synthetic construct
  source 1..23: mol_type = other DNA
  modified_base 1: mod_base = OTHER; note = Vinyl-phosphonate-2'-O-methyluridine-3'-phosphate
  modified_base 3: mod_base = OTHER; note = 2'-O-methylcytidine-3'-phosphate
  modified_base 4: mod_base = OTHER; note = 2'-O-methylguanosine-3'-phosphate
  modified_base 6: mod_base = OTHER; note = 2'-O-methyluridine-3'-phosphate
  modified_base 8: mod_base = OTHER; note = 2'-O-methylcytidine-3'-phosphate
  modified_base 9: mod_base = OTHER; note = 2'-O-methyluridine-3'-phosphate
  modified_base 10: mod_base = OTHER; note = 2'-O-methyluridine-3'-phosphate
  modified_base 11: mod_base = OTHER; note = 2'-O-methylguanosine-3'-phosphate
  modified_base 13: mod_base = OTHER; note = 2'-O-methyladenosine-3'-phosphate
  modified_base 14: mod_base = OTHER; note = 2'-fluoroadenosine-3'-phosphate
  modified_base 15: mod_base = OTHER; note = 2'-O-methyluridine-3'-phosphate
  modified_base 16: mod_base = OTHER; note = 2'-O-methylcytidine-3'-phosphate
  modified_base 17: mod_base = OTHER; note = 2'-O-methyluridine-3'-phosphate
  modified_base 18: mod_base = OTHER; note = 2'-O-methyluridine-3'-phosphate
  modified_base 19: mod_base = OTHER; note = 2'-O-methylguanosine-3'-phosphate
  modified_base 20: mod_base = OTHER; note = 2'-O-methyluridine-3'-phosphate
  modified_base 21: mod_base = OTHER; note = 2'-O-methylguanosine-3'-phosphorothioate
  modified_base 22: mod_base = OTHER; note = 2'-O-methylguanosine-3'-phosphorothioate
  modified_base 23: mod_base = OTHER; note = 2'-O-methylcytidine-3'-phosphate
  misc_feature 1: note = RNA
  misc_feature 2: note = DNA
  misc_feature 3..4: note = RNA
  misc_feature 5: note = DNA
  misc_feature 6: note = RNA
  misc_feature 7: note = DNA
  misc_feature 8..11: note = RNA
  misc_feature 12: note = DNA
  misc_feature 13..23: note = RNA
tccgtttcttgtaatcttgtggc

SEQ ID NO: 1146 - DNA, 23 bp, synthetic construct
  source 1..23: mol_type = other DNA
  modified_base 1: mod_base = OTHER; note = Vinyl-phosphonate-2'-O-methyluridine-3'-phosphate
  modified_base 3: mod_base = OTHER; note = 2'-O-methylcytidine-3'-phosphate
  modified_base 4: mod_base = OTHER; note = 2'-O-methylcytidine-3'-phosphate
  modified_base 6: mod_base = OTHER; note = 2'-O-methyluridine-3'-phosphate
  modified_base 8: mod_base = OTHER; note = 2'-O-methyluridine-3'-phosphate
  modified_base 9: mod_base = OTHER; note = 2'-O-methylcytidine-3'-phosphate
  modified_base 10: mod_base = OTHER; note = 2'-O-methyluridine-3'-phosphate
  modified_base 11: mod_base = OTHER; note = 2'-O-methyluridine-3'-phosphate
  modified_base 13: mod_base = OTHER; note = 2'-O-methyluridine-3'-phosphate
  modified_base 14: mod_base = OTHER; note = 2'-fluoroadenosine-3'-phosphate
  modified_base 15: mod_base = OTHER; note = 2'-O-methyladenosine-3'-phosphate
  modified_base 16: mod_base = OTHER; note = 2'-O-methyluridine-3'-phosphate
  modified_base 17: mod_base = OTHER; note = 2'-O-methylcytidine-3'-phosphate
  modified_base 18: mod_base = OTHER; note = 2'-O-methyluridine-3'-phosphate
  modified_base 19: mod_base = OTHER; note = 2'-O-methyluridine-3'-phosphate
  modified_base 20: mod_base = OTHER; note = 2'-O-methylguanosine-3'-phosphate
  modified_base 21: mod_base = OTHER; note = 2'-O-methyluridine-3'-phosphorothioate
  modified_base 22: mod_base = OTHER; note = 2'-O-methylguanosine-3'-phosphorothioate
  modified_base 23: mod_base = OTHER; note = 2'-O-methylguanosine-3'-phosphate
  misc_feature 1: note = RNA
  misc_feature 2: note = DNA
  misc_feature 3..4: note = RNA
  misc_feature 5: note = DNA
  misc_feature 6: note = RNA
  misc_feature 7: note = DNA
  misc_feature 8..11: note = RNA
  misc_feature 12: note = DNA
  misc_feature 13..23: note = RNA
tgccgtttcttgtaatcttgtgg

SEQ ID NO: 1147 - DNA, 23 bp, synthetic construct
  source 1..23: mol_type = other DNA
  modified_base 1: mod_base = OTHER; note = Vinyl-phosphonate-2'-O-methyluridine-3'-phosphate
  modified_base 3: mod_base = OTHER; note = 2'-O-methylguanosine-3'-phosphate
  modified_base 4: mod_base = OTHER; note = 2'-O-methylcytidine-3'-phosphate
  modified_base 6: mod_base = OTHER; note = 2'-O-methylguanosine-3'-phosphate
  modified_base 8: mod_base = OTHER; note = 2'-O-methyluridine-3'-phosphate
  modified_base 9: mod_base = OTHER; note = 2'-O-methyluridine-3'-phosphate
  modified_base 10: mod_base = OTHER; note = 2'-O-methylcytidine-3'-phosphate
  modified_base 11: mod_base = OTHER; note = 2'-O-methyluridine-3'-phosphate
  modified_base 13: mod_base = OTHER; note = 2'-O-methylguanosine-3'-phosphate
  modified_base 14: mod_base = OTHER; note = 2'-fluorouridine-3'-phosphate
  modified_base 15: mod_base = OTHER; note = 2'-O-methyladenosine-3'-phosphate
  modified_base 16: mod_base = OTHER; note = 2'-O-methyladenosine-3'-phosphate
  modified_base 17: mod_base = OTHER; note = 2'-O-methyluridine-3'-phosphate
  modified_base 18: mod_base = OTHER; note = 2'-O-methylcytidine-3'-phosphate
  modified_base 19: mod_base = OTHER; note = 2'-O-methyluridine-3'-phosphate
  modified_base 20: mod_base = OTHER; note = 2'-O-methyluridine-3'-phosphate
  modified_base 21: mod_base = OTHER; note = 2'-O-methylguanosine-3'-phosphorothioate
  modified_base 22: mod_base = OTHER; note = 2'-O-methyluridine-3'-phosphorothioate
  modified_base 23: mod_base = OTHER; note = 2'-O-methylguanosine-3'-phosphate
  misc_feature 1: note = RNA
  misc_feature 2: note = DNA
  misc_feature 3..4: note = RNA
  misc_feature 5: note = DNA
  misc_feature 6: note = RNA
  misc_feature 7: note = DNA
  misc_feature 8..11: note = RNA
  misc_feature 12: note = DNA
  misc_feature 13..23: note = RNA
tagccgtttcttgtaatcttgtg

SEQ ID NO: 1148 - DNA, 23 bp, synthetic construct
  source 1..23: mol_type = other DNA
  modified_base 1: mod_base = OTHER; note = Vinyl-phosphonate-2'-O-methyluridine-3'-phosphate
  modified_base 3: mod_base = OTHER; note = 2'-O-methyladenosine-3'-phosphate
  modified_base 4: mod_base = OTHER; note = 2'-O-methylguanosine-3'-phosphate
  modified_base 6: mod_base = OTHER; note = 2'-O-methylcytidine-3'-phosphate
  modified_base 8: mod_base = OTHER; note = 2'-O-methyluridine-3'-phosphate
  modified_base 9: mod_base = OTHER; note = 2'-O-methyluridine-3'-phosphate
  modified_base 10: mod_base = OTHER; note = 2'-O-methyluridine-3'-phosphate
  modified_base 11: mod_base = OTHER; note = 2'-O-methylcytidine-3'-phosphate
  modified_base 13: mod_base = OTHER; note = 2'-O-methyluridine-3'-phosphate
  modified_base 14: mod_base = OTHER; note = 2'-fluoroguanosine-3'-phosphate
  modified_base 15: mod_base = OTHER; note = 2'-O-methyluridine-3'-phosphate
  modified_base 16: mod_base = OTHER; note = 2'-O-methyladenosine-3'-phosphate
  modified_base 17: mod_base = OTHER; note = 2'-O-methyladenosine-3'-phosphate
  modified_base 18: mod_base = OTHER; note = 2'-O-methyluridine-3'-phosphate
  modified_base 19: mod_base = OTHER; note = 2'-O-methylcytidine-3'-phosphate
  modified_base 20: mod_base = OTHER; note = 2'-O-methyluridine-3'-phosphate
  modified_base 21: mod_base = OTHER; note = 2'-O-methyluridine-3'-phosphorothioate
  modified_base 22: mod_base = OTHER; note = 2'-O-methylguanosine-3'-phosphorothioate
  modified_base 23: mod_base = OTHER; note = 2'-O-methyluridine-3'-phosphate
  misc_feature 1: note = RNA
  misc_feature 2: note = DNA
  misc_feature 3..4: note = RNA
  misc_feature 5: note = DNA
  misc_feature 6: note = RNA
  misc_feature 7: note = DNA
  misc_feature 8..11: note = RNA
  misc_feature 12: note = DNA
  misc_feature 13..23: note = RNA
taagccgtttcttgtaatcttgt

SEQ ID NO: 1149 - DNA, 23 bp, synthetic construct
  source 1..23: mol_type = other DNA
  modified_base 1: mod_base = OTHER; note = Vinyl-phosphonate-2'-O-methyluridine-3'-phosphate
  modified_base 3: mod_base = OTHER; note = 2'-O-methyluridine-3'-phosphate
  modified_base 4: mod_base = OTHER; note = 2'-O-methylguanosine-3'-phosphate
  modified_base 6: mod_base = OTHER; note = 2'-O-methyladenosine-3'-phosphate
  modified_base 8: mod_base = OTHER; note = 2'-O-methylguanosine-3'-phosphate
  modified_base 9: mod_base = OTHER; note = 2'-O-methylcytidine-3'-phosphate
  modified_base 10: mod_base = OTHER; note = 2'-O-methylcytidine-3'-phosphate
  modified_base 11: mod_base = OTHER; note = 2'-O-methylguanosine-3'-phosphate
  modified_base 13: mod_base = OTHER; note = 2'-O-methyluridine-3'-phosphate
  modified_base 14: mod_base = OTHER; note = 2'-fluorouridine-3'-phosphate
  modified_base 15: mod_base = OTHER; note = 2'-O-methylcytidine-3'-phosphate
  modified_base 16: mod_base = OTHER; note = 2'-O-methyluridine-3'-phosphate
  modified_base 17: mod_base = OTHER; note = 2'-O-methyluridine-3'-phosphate
  modified_base 18: mod_base = OTHER; note = 2'-O-methylguanosine-3'-phosphate
  modified_base 19: mod_base = OTHER; note = 2'-O-methyluridine-3'-phosphate
  modified_base 20: mod_base = OTHER; note = 2'-O-methyladenosine-3'-phosphate
  modified_base 21: mod_base = OTHER; note = 2'-O-methyladenosine-3'-phosphorothioate
  modified_base 22: mod_base = OTHER; note = 2'-O-methyluridine-3'-phosphorothioate
  modified_base 23: mod_base = OTHER; note = 2'-O-methylcytidine-3'-phosphate
  misc_feature 1: note = RNA
  misc_feature 2: note = DNA
  misc_feature 3..4: note = RNA
  misc_feature 5: note = DNA
  misc_feature 6: note = RNA
  misc_feature 7: note = DNA
  misc_feature 8..11: note = RNA
  misc_feature 12: note = DNA
  misc_feature 13..23: note = RNA
tctgaaagccgtttcttgtaatc

SEQ ID NO: 1150 - DNA, 23 bp, synthetic construct
  source 1..23: mol_type = other DNA
  modified_base 1: mod_base = OTHER; note = Vinyl-phosphonate-2'-O-methyluridine-3'-phosphate
  modified_base 3: mod_base = OTHER; note = 2'-O-methylcytidine-3'-phosphate
  modified_base 4: mod_base = OTHER; note = 2'-O-methyluridine-3'-phosphate
  modified_base 6: mod_base = OTHER; note = 2'-O-methyladenosine-3'-phosphate
  modified_base 8: mod_base = OTHER; note = 2'-O-methyladenosine-3'-phosphate
  modified_base 9: mod_base = OTHER; note = 2'-O-methylguanosine-3'-phosphate
  modified_base 10: mod_base = OTHER; note = 2'-O-methylcytidine-3'-phosphate
  modified_base 11: mod_base = OTHER; note = 2'-O-methylcytidine-3'-phosphate
  modified_base 13: mod_base = OTHER; note = 2'-O-methyluridine-3'-phosphate
  modified_base 14: mod_base = OTHER; note = 2'-fluorouridine-3'-phosphate
  modified_base 15: mod_base = OTHER; note = 2'-O-methyluridine-3'-phosphate
  modified_base 16: mod_base = OTHER; note = 2'-O-methylcytidine-3'-phosphate
  modified_base 17: mod_base = OTHER; note = 2'-O-methyluridine-3'-phosphate
  modified_base 18: mod_base = OTHER; note = 2'-O-methyluridine-3'-phosphate
  modified_base 19: mod_base = OTHER; note = 2'-O-methylguanosine-3'-phosphate
  modified_base 20: mod_base = OTHER; note = 2'-O-methyluridine-3'-phosphate
  modified_base 21: mod_base = OTHER; note = 2'-O-methyladenosine-3'-phosphorothioate
  modified_base 22: mod_base = OTHER; note = 2'-O-methyladenosine-3'-phosphorothioate
  modified_base 23: mod_base = OTHER; note = 2'-O-methyluridine-3'-phosphate
  misc_feature 1: note = RNA
  misc_feature 2: note = DNA
  misc_feature 3..4: note = RNA
  misc_feature 5: note = DNA
  misc_feature 6: note = RNA
  misc_feature 7: note = DNA
  misc_feature 8..11: note = RNA
  misc_feature 12: note = DNA
  misc_feature 13..23: note = RNA
tactgaaagccgtttcttgtaat

SEQ ID NO: 1151 - DNA, 23 bp, synthetic construct
  source 1..23: mol_type = other DNA
  modified_base 1: mod_base = OTHER; note = Vinyl-phosphonate-2'-O-methyluridine-3'-phosphate
  modified_base 2: mod_base = OTHER; note = 2'-fluoroadenosine-3'-phosphate
  modified_base 3: mod_base = OTHER; note = 2'-O-methylguanosine-3'-phosphate
  modified_base 4: mod_base = OTHER; note = 2'-O-methylcytidine-3'-phosphate
  modified_base 6: mod_base = OTHER; note = 2'-O-methylcytidine-3'-phosphate
  modified_base 7: mod_base = OTHER; note = Adenosine-glycol nucleic acid (GNA)
  modified_base 8: mod_base = OTHER; note = 2'-O-methyladenosine-3'-phosphate
  modified_base 9: mod_base = OTHER; note = 2'-O-methylcytidine-3'-phosphate
  modified_base 10: mod_base = OTHER; note = 2'-O-methyluridine-3'-phosphate
  modified_base 11: mod_base = OTHER; note = 2'-O-methylguanosine-3'-phosphate
  modified_base 12: mod_base = OTHER; note = 2'-O-methyladenosine-3'-phosphate
  modified_base 13: mod_base = OTHER; note = 2'-O-methyladenosine-3'-phosphate
  modified_base 14: mod_base = OTHER; note = 2'-fluoroadenosine-3'-phosphate
  modified_base 15: mod_base = OTHER; note = 2'-O-methylguanosine-3'-phosphate
  modified_base 16: mod_base = OTHER; note = 2'-fluorocytidine-3'-phosphate
  modified_base 17: mod_base = OTHER; note = 2'-O-methylcytidine-3'-phosphate
  modified_base 18: mod_base = OTHER; note = 2'-O-methylguanosine-3'-phosphate
  modified_base 19: mod_base = OTHER; note = 2'-O-methyluridine-3'-phosphate
  modified_base 20: mod_base = OTHER; note = 2'-O-methyluridine-3'-phosphate
  modified_base 21: mod_base = OTHER; note = 2'-O-methyluridine-3'-phosphorothioate
  modified_base 22: mod_base = OTHER; note = 2'-O-methylcytidine-3'-phosphorothioate
  modified_base 23: mod_base = OTHER; note = 2'-O-methyluridine-3'-phosphate
  misc_feature 1..4: note = RNA
  misc_feature 5: note = DNA
  misc_feature 6..23: note = RNA
tagctcaactgaaagccgtttct

SEQ ID NO: 1152 - DNA, 23 bp, synthetic construct
  source 1..23: mol_type = other DNA
  modified_base 1: mod_base = OTHER; note = Vinyl-phosphonate-2'-O-methyluridine-3'-phosphate
  modified_base 2: mod_base = OTHER; note = 2'-fluorouridine-3'-phosphate
  modified_base 3: mod_base = OTHER; note = 2'-O-methylguanosine-3'-phosphate
  modified_base 4: mod_base = OTHER; note = 2'-O-methylguanosine-3'-phosphate
  modified_base 6: mod_base = OTHER; note = 2'-O-methylcytidine-3'-phosphate
  modified_base 7: mod_base = OTHER; note = Adenosine-glycol nucleic acid (GNA)
  modified_base 8: mod_base = OTHER; note = 2'-O-methylguanosine-3'-phosphate
  modified_base 9: mod_base = OTHER; note = 2'-O-methylcytidine-3'-phosphate
  modified_base 10: mod_base = OTHER; note = 2'-O-methyluridine-3'-phosphate
  modified_base 11: mod_base = OTHER; note = 2'-O-methylcytidine-3'-phosphate
  modified_base 12: mod_base = OTHER; note = 2'-O-methyladenosine-3'-phosphate
  modified_base 13: mod_base = OTHER; note = 2'-O-methyladenosine-3'-phosphate
  modified_base 14: mod_base = OTHER; note = 2'-fluorocytidine-3'-phosphate
  modified_base 15: mod_base = OTHER; note = 2'-O-methyluridine-3'-phosphate
  modified_base 16: mod_base = OTHER; note = 2'-fluoroguanosine-3'-phosphate
  modified_base 17: mod_base = OTHER; note = 2'-O-methyladenosine-3'-phosphate
  modified_base 18: mod_base = OTHER; note = 2'-O-methyladenosine-3'-phosphate
  modified_base 19: mod_base = OTHER; note = 2'-O-methyladenosine-3'-phosphate
  modified_base 20: mod_base = OTHER; note = 2'-O-methylguanosine-3'-phosphate
  modified_base 21: mod_base = OTHER; note = 2'-O-methylcytidine-3'-phosphorothioate
  modified_base 22: mod_base = OTHER; note = 2'-O-methylcytidine-3'-phosphorothioate
  modified_base 23: mod_base = OTHER; note = 2'-O-methylguanosine-3'-phosphate
  misc_feature 1..4: note = RNA
  misc_feature 5: note = DNA
  misc_feature 6..23: note = RNA
ttggtcagctcaactgaaagccg

SEQ ID NO: 1153 - DNA, 23 bp, synthetic construct
  source 1..23: mol_type = other DNA
  modified_base 1: mod_base = OTHER; note = Vinyl-phosphonate-2'-O-methyluridine-3'-phosphate
  modified_base 3: mod_base = OTHER; note = 2'-O-methylcytidine-3'-phosphate
  modified_base 4: mod_base = OTHER; note = 2'-O-methyladenosine-3'-phosphate
  modified_base 6: mod_base = OTHER; note = 2'-O-methylcytidine-3'-phosphate
  modified_base 8: mod_base = OTHER; note = 2'-O-methyladenosine-3'-phosphate
  modified_base 9: mod_base = OTHER; note = 2'-O-methyluridine-3'-phosphate
  modified_base 10: mod_base = OTHER; note = 2'-O-methyladenosine-3'-phosphate
  modified_base 11: mod_base = OTHER; note = 2'-O-methyluridine-3'-phosphate
  modified_base 13: mod_base = OTHER; note = 2'-O-methyladenosine-3'-phosphate
  modified_base 14: mod_base = OTHER; note = 2'-fluoroadenosine-3'-phosphate
  modified_base 15: mod_base = OTHER; note = 2'-O-methylguanosine-3'-phosphate
  modified_base 16: mod_base = OTHER; note = 2'-O-methyluridine-3'-phosphate
  modified_base 17: mod_base = OTHER; note = 2'-O-methylcytidine-3'-phosphate
  modified_base 18: mod_base = OTHER; note = 2'-O-methylcytidine-3'-phosphate
  modified_base 19: mod_base = OTHER; note = 2'-O-methyladenosine-3'-phosphate
  modified_base 20: mod_base = OTHER; note = 2'-O-methyladenosine-3'-phosphate
  modified_base 21: mod_base = OTHER; note = 2'-O-methylguanosine-3'-phosphorothioate
  modified_base 22: mod_base = OTHER; note = 2'-O-methyladenosine-3'-phosphorothioate
  modified_base 23: mod_base = OTHER; note = 2'-O-methyluridine-3'-phosphate
  misc_feature 1: note = RNA
  misc_feature 2: note = DNA
  misc_feature 3..4: note = RNA
  misc_feature 5: note = DNA
  misc_feature 6: note = RNA
  misc_feature 7: note = DNA
  misc_feature 8..11: note = RNA
  misc_feature 12: note = DNA
  misc_feature 13..23: note = RNA
tgcaccaatatcaagtccaagat

SEQ ID NO: 1154 - DNA, 23 bp, synthetic construct
  source 1..23: mol_type = other DNA
  modified_base 1: mod_base = OTHER; note = Vinyl-phosphonate-2'-O-methyluridine-3'-phosphate
  modified_base 2: mod_base = OTHER; note = 2'-fluorocytidine-3'-phosphate
  modified_base 3: mod_base = OTHER; note = 2'-O-methyluridine-3'-phosphate
  modified_base 4: mod_base = OTHER; note = 2'-O-methyladenosine-3'-phosphate
  modified_base 6: mod_base = OTHER; note = 2'-O-methylguanosine-3'-phosphate
  modified_base 7: mod_base = OTHER; note = Adenosine-glycol nucleic acid (GNA)
  modified_base 8: mod_base = OTHER; note = 2'-O-methyluridine-3'-phosphate
  modified_base 9: mod_base = OTHER; note = 2'-O-methylcytidine-3'-phosphate
  modified_base 10: mod_base = OTHER; note = 2'-O-methyladenosine-3'-phosphate
  modified_base 11: mod_base = OTHER; note = 2'-O-methyluridine-3'-phosphate
  modified_base 12: mod_base = OTHER; note = 2'-O-methylcytidine-3'-phosphate
  modified_base 13: mod_base = OTHER; note = 2'-O-methylcytidine-3'-phosphate
  modified_base 14: mod_base = OTHER; note = 2'-fluorouridine-3'-phosphate
  modified_base 15: mod_base = OTHER; note = 2'-O-methylguanosine-3'-phosphate
  modified_base 16: mod_base = OTHER; note = 2'-fluoroguanosine-3'-phosphate
  modified_base 17: mod_base = OTHER; note = 2'-O-methylcytidine-3'-phosphate
  modified_base 18: mod_base = OTHER; note = 2'-O-methylguanosine-3'-phosphate
  modified_base 19: mod_base = OTHER; note = 2'-O-methyladenosine-3'-phosphate
  modified_base 20: mod_base = OTHER; note = 2'-O-methyluridine-3'-phosphate
  modified_base 21: mod_base = OTHER; note = 2'-O-methyladenosine-3'-phosphorothioate
  modified_base 22: mod_base = OTHER; note = 2'-O-methyluridine-3'-phosphorothioate
  modified_base 23: mod_base = OTHER; note = 2'-O-methylcytidine-3'-phosphate
  misc_feature 1..4: note = RNA
  misc_feature 5: note = DNA
  misc_feature 6..23: note = RNA
tctaggatcatcctggcgatatc

SEQ ID NO: 1155 - DNA, 23 bp, synthetic construct
  source 1..23: mol_type = other DNA
  modified_base 1: mod_base = OTHER; note = Vinyl-phosphonate-2'-O-methyluridine-3'-phosphate
  modified_base 2: mod_base = OTHER; note = 2'-fluorouridine-3'-phosphate
  modified_base 3: mod_base = OTHER; note = 2'-O-methyladenosine-3'-phosphate
  modified_base 4: mod_base = OTHER; note = 2'-O-methylguanosine-3'-phosphate
  modified_base 6: mod_base = OTHER; note = 2'-O-methylcytidine-3'-phosphate
  modified_base 7: mod_base = OTHER; note = Adenosine-glycol nucleic acid (GNA)
  modified_base 8: mod_base = OTHER; note = 2'-O-methylguanosine-3'-phosphate
  modified_base 9: mod_base = OTHER; note = 2'-O-methylcytidine-3'-phosphate
  modified_base 10: mod_base = OTHER; note = 2'-O-methyladenosine-3'-phosphate
  modified_base 11: mod_base = OTHER; note = 2'-O-methylcytidine-3'-phosphate
  modified_base 12: mod_base = OTHER; note = 2'-O-methylcytidine-3'-phosphate
  modified_base 13: mod_base = OTHER; note = 2'-O-methyladenosine-3'-phosphate
  modified_base 14: mod_base = OTHER; note = 2'-fluoroguanosine-3'-phosphate
  modified_base 15: mod_base = OTHER; note = 2'-O-methylguanosine-3'-phosphate
  modified_base 16: mod_base = OTHER; note = 2'-fluoroguanosine-3'-phosphate
  modified_base 17: mod_base = OTHER; note = 2'-O-methyluridine-3'-phosphate
  modified_base 18: mod_base = OTHER; note = 2'-O-methylguanosine-3'-phosphate
  modified_base 19: mod_base = OTHER; note = 2'-O-methylguanosine-3'-phosphate
  modified_base 20: mod_base = OTHER; note = 2'-O-methyluridine-3'-phosphate
  modified_base 21: mod_base = OTHER; note = 2'-O-methylguanosine-3'-phosphorothioate
  modified_base 22: mod_base = OTHER; note = 2'-O-methylguanosine-3'-phosphorothioate
  modified_base 23: mod_base = OTHER; note = 2'-O-methylcytidine-3'-phosphate
  misc_feature 1..4: note = RNA
  misc_feature 5: note = DNA
  misc_feature 6..23: note = RNA
ttagtcagcaccagggtggtggc

SEQ ID NO: 1156 - DNA, 23 bp, synthetic construct
  source 1..23: mol_type = other DNA
  modified_base 1: mod_base = OTHER; note = Vinyl-phosphonate-2'-O-methyluridine-3'-phosphate
  modified_base 3: mod_base = OTHER; note = 2'-O-methyluridine-3'-phosphate
  modified_base 4: mod_base = OTHER; note = 2'-O-methylcytidine-3'-phosphate
  modified_base 6: mod_base = OTHER; note = 2'-O-methyladenosine-3'-phosphate
  modified_base 8: mod_base = OTHER; note = 2'-O-methylcytidine-3'-phosphate
  modified_base 9: mod_base = OTHER; note = 2'-O-methylcytidine-3'-phosphate
  modified_base 10: mod_base = OTHER; note = 2'-O-methyladenosine-3'-phosphate
  modified_base 11: mod_base = OTHER; note = 2'-O-methylguanosine-3'-phosphate
  modified_base 13: mod_base = OTHER; note = 2'-O-methylcytidine-3'-phosphate
  modified_base 14: mod_base = OTHER; note = 2'-fluorocytidine-3'-phosphate
  modified_base 15: mod_base = OTHER; note = 2'-O-methyladenosine-3'-phosphate
  modified_base 16: mod_base = OTHER; note = 2'-O-methylguanosine-3'-phosphate
  modified_base 17: mod_base = OTHER; note = 2'-O-methylcytidine-3'-phosphate
  modified_base 18: mod_base = OTHER; note = 2'-O-methyluridine-3'-phosphate
  modified_base 19: mod_base = OTHER; note = 2'-O-methylguanosine-3'-phosphate
  modified_base 20: mod_base = OTHER; note = 2'-O-methyladenosine-3'-phosphate
  modified_base 21: mod_base = OTHER; note = 2'-O-methyluridine-3'-phosphorothioate
  modified_base 22: mod_base = OTHER; note = 2'-O-methyluridine-3'-phosphorothioate
  modified_base 23: mod_base = OTHER; note = 2'-O-methylguanosine-3'-phosphate
  misc_feature 1: note = RNA
  misc_feature 2: note = DNA
  misc_feature 3..4: note = RNA
  misc_feature 5: note = DNA
  misc_feature 6: note = RNA
  misc_feature 7: note = DNA
  misc_feature 8..11: note = RNA
  misc_feature 12: note = DNA
  misc_feature 13..23: note = RNA
tatcaaaccaggccagctgattg

SEQ ID NO: 1157 - DNA, 23 bp, synthetic construct
  source 1..23: mol_type = other DNA
  modified_base 1: mod_base = OTHER; note = Vinyl-phosphonate-2'-O-methyluridine-3'-phosphate
  modified_base 2: mod_base = OTHER; note = 2'-fluorouridine-3'-phosphate
  modified_base 3: mod_base = OTHER; note = 2'-O-methyladenosine-3'-phosphate
  modified_base 4: mod_base = OTHER; note = 2'-O-methyluridine-3'-phosphate
  modified_base 6: mod_base = OTHER; note = 2'-O-methyladenosine-3'-phosphate
  modified_base 7: mod_base = OTHER; note = Adenosine-glycol nucleic acid (GNA)
  modified_base 8: mod_base = OTHER; note = 2'-O-methyladenosine-3'-phosphate
  modified_base 9: mod_base = OTHER; note = 2'-O-methylcytidine-3'-phosphate
  modified_base 10: mod_base = OTHER; note = 2'-O-methylcytidine-3'-phosphate
  modified_base 11: mod_base = OTHER; note = 2'-O-methyladenosine-3'-phosphate
  modified_base 12: mod_base = OTHER; note = 2'-O-methylguanosine-3'-phosphate
  modified_base 13: mod_base = OTHER; note = 2'-O-methylguanosine-3'-phosphate
  modified_base 14: mod_base = OTHER; note = 2'-fluorocytidine-3'-phosphate
  modified_base 15: mod_base = OTHER; note = 2'-O-methylcytidine-3'-phosphate
  modified_base 16: mod_base = OTHER; note = 2'-fluoroadenosine-3'-phosphate
  modified_base 17: mod_base = OTHER; note = 2'-O-methylguanosine-3'-phosphate
  modified_base 18: mod_base = OTHER; note = 2'-O-methylcytidine-3'-phosphate
  modified_base 19: mod_base = OTHER; note = 2'-O-methyluridine-3'-phosphate
  modified_base 20: mod_base = OTHER; note = 2'-O-methylguanosine-3'-phosphate
  modified_base 21: mod_base = OTHER; note = 2'-O-methyladenosine-3'-phosphorothioate
  modified_base 22: mod_base = OTHER; note = 2'-O-methyluridine-3'-phosphorothioate
  modified_base 23: mod_base = OTHER; note = 2'-O-methyluridine-3'-phosphate
  misc_feature 1..4: note = RNA
  misc_feature 5: note = DNA
  misc_feature 6..23: note = RNA
ttatcaaaccaggccagctgatt

SEQ ID NO: 1158 - DNA, 23 bp, synthetic construct
  source 1..23: mol_type = other DNA
  modified_base 1: mod_base = OTHER; note = Vinyl-phosphonate-2'-O-methyluridine-3'-phosphate
  modified_base 3: mod_base = OTHER; note = 2'-O-methyladenosine-3'-phosphate
  modified_base 4: mod_base = OTHER; note = 2'-O-methyluridine-3'-phosphate
  modified_base 6: mod_base = OTHER; note = 2'-O-methyladenosine-3'-phosphate
  modified_base 8: mod_base = OTHER; note = 2'-O-methyladenosine-3'-phosphate
  modified_base 9: mod_base = OTHER; note = 2'-O-methylcytidine-3'-phosphate
  modified_base 10: mod_base = OTHER; note = 2'-O-methylcytidine-3'-phosphate
  modified_base 11: mod_base = OTHER; note = 2'-O-methyladenosine-3'-phosphate
  modified_base 13: mod_base = OTHER; note = 2'-O-methylguanosine-3'-phosphate
  modified_base 14: mod_base = OTHER; note = 2'-fluorocytidine-3'-phosphate
  modified_base 15: mod_base = OTHER; note = 2'-O-methylcytidine-3'-phosphate
  modified_base 16: mod_base = OTHER; note = 2'-O-methyladenosine-3'-phosphate
  modified_base 17: mod_base = OTHER; note = 2'-O-methylguanosine-3'-phosphate
  modified_base 18: mod_base = OTHER; note = 2'-O-methylcytidine-3'-phosphate
  modified_base 19: mod_base = OTHER; note = 2'-O-methyluridine-3'-phosphate
  modified_base 20: mod_base = OTHER; note = 2'-O-methylguanosine-3'-phosphate
  modified_base 21: mod_base = OTHER; note = 2'-O-methyladenosine-3'-phosphorothioate
  modified_base 22: mod_base = OTHER; note = 2'-O-methyluridine-3'-phosphorothioate
  modified_base 23: mod_base = OTHER; note = 2'-O-methyluridine-3'-phosphate
  misc_feature 1: note = RNA
  misc_feature 2: note = DNA
  misc_feature 3..4: note = RNA
  misc_feature 5: note = DNA
  misc_feature 6: note = RNA
  misc_feature 7: note = DNA
  misc_feature 8..11: note = RNA
  misc_feature 12: note = DNA
  misc_feature 13..23: note = RNA
ttatcaaaccaggccagctgatt

SEQ ID NO: 1159 - DNA, 23 bp, synthetic construct
  source 1..23: mol_type = other DNA
  modified_base 1: mod_base = OTHER; note = Vinyl-phosphonate-2'-O-methyluridine-3'-phosphate
  modified_base 2: mod_base = OTHER; note = 2'-fluorouridine-3'-phosphate
  modified_base 3: mod_base = OTHER; note = 2'-O-methylcytidine-3'-phosphate
  modified_base 4: mod_base = OTHER; note = 2'-O-methyladenosine-3'-phosphate
  modified_base 6: mod_base = OTHER; note = 2'-O-methyluridine-3'-phosphate
  modified_base 7: mod_base = OTHER; note = Adenosine-glycol nucleic acid (GNA)
  modified_base 8: mod_base = OTHER; note = 2'-O-methyluridine-3'-phosphate
  modified_base 9: mod_base = OTHER; note = 2'-O-methylcytidine-3'-phosphate
  modified_base 10: mod_base = OTHER; note = 2'-O-methyladenosine-3'-phosphate
  modified_base 11: mod_base = OTHER; note = 2'-O-methyladenosine-3'-phosphate
  modified_base 12: mod_base = OTHER; note = 2'-O-methyladenosine-3'-phosphate
  modified_base 13: mod_base = OTHER; note = 2'-O-methylcytidine-3'-phosphate
  modified_base 14: mod_base = OTHER; note = 2'-fluorocytidine-3'-phosphate
  modified_base 15: mod_base = OTHER; note = 2'-O-methyladenosine-3'-phosphate
  modified_base 16: mod_base = OTHER; note = 2'-fluoroguanosine-3'-phosphate
  modified_base 17: mod_base = OTHER; note = 2'-O-methylguanosine-3'-phosphate
  modified_base 18: mod_base = OTHER; note = 2'-O-methylcytidine-3'-phosphate
  modified_base 19: mod_base = OTHER; note = 2'-O-methylcytidine-3'-phosphate
  modified_base 20: mod_base = OTHER; note = 2'-O-methyladenosine-3'-phosphate
  modified_base 21: mod_base = OTHER; note = 2'-O-methylguanosine-3'-phosphorothioate
  modified_base 22: mod_base = OTHER; note = 2'-O-methylcytidine-3'-phosphorothioate
  modified_base 23: mod_base = OTHER; note = 2'-O-methyluridine-3'-phosphate
  misc_feature 1..4: note = RNA
  misc_feature 5: note = DNA
  misc_feature 6..23: note = RNA
ttcagtatcaaaccaggccagct

SEQ ID NO: 1160 - DNA, 23 bp, synthetic construct
  source 1..23: mol_type = other DNA
  modified_base 1: mod_base = OTHER; note = Vinyl-phosphonate-2'-O-methyluridine-3'-phosphate
  modified_base 3: mod_base = OTHER; note = 2'-O-methylcytidine-3'-phosphate
  modified_base 4: mod_base = OTHER; note = 2'-O-methylcytidine-3'-phosphate
  modified_base 6: mod_base = OTHER; note = 2'-O-methyladenosine-3'-phosphate
  modified_base 8: mod_base = OTHER; note = 2'-O-methyladenosine-3'-phosphate
  modified_base 9: mod_base = OTHER; note = 2'-O-methylguanosine-3'-phosphate
  modified_base 10: mod_base = OTHER; note = 2'-O-methylguanosine-3'-phosphate
  modified_base 11: mod_base = OTHER; note = 2'-O-methyladenosine-3'-phosphate
  modified_base 13: mod_base = OTHER; note = 2'-O-methylguanosine-3'-phosphate
  modified_base 14: mod_base = OTHER; note = 2'-fluoroadenosine-3'-phosphate
  modified_base 15: mod_base = OTHER; note = 2'-O-methyluridine-3'-phosphate
  modified_base 16: mod_base = OTHER; note = 2'-O-methyluridine-3'-phosphate
  modified_base 17: mod_base = OTHER; note = 2'-O-methyluridine-3'-phosphate
  modified_base 18: mod_base = OTHER; note = 2'-O-methyladenosine-3'-phosphate
  modified_base 19: mod_base = OTHER; note = 2'-O-methylcytidine-3'-phosphate
  modified_base 20: mod_base = OTHER; note = 2'-O-methyladenosine-3'-phosphate
  modified_base 21: mod_base = OTHER; note = 2'-O-methylguanosine-3'-phosphorothioate
  modified_base 22: mod_base = OTHER; note = 2'-O-methylguanosine-3'-phosphorothioate
  modified_base 23: mod_base = OTHER; note = 2'-O-methyluridine-3'-phosphate
  misc_feature 1: note = RNA
  misc_feature 2: note = DNA
  misc_feature 3..4: note = RNA
  misc_feature 5: note = DNA
  misc_feature 6: note = RNA
  misc_feature 7: note = DNA
  misc_feature 8..11: note = RNA
  misc_feature 12: note = DNA
  misc_feature 13..23: note = RNA
tacctaaaggatgatttacaggt

SEQ ID NO: 1161 - DNA, 23 bp, synthetic construct
  source 1..23: mol_type = other DNA
  modified_base 1: mod_base = OTHER; note = Vinyl-phosphonate-2'-O-methyluridine-3'-phosphate
  modified_base 3: mod_base = OTHER; note = 2'-O-methyladenosine-3'-phosphate
  modified_base 4: mod_base = OTHER; note = 2'-O-methylcytidine-3'-phosphate
  modified_base 6: mod_base = OTHER; note = 2'-O-methyluridine-3'-phosphate
  modified_base 8: mod_base = OTHER; note = 2'-O-methyladenosine-3'-phosphate
  modified_base 9: mod_base = OTHER; note = 2'-O-methyladenosine-3'-phosphate
  modified_base 10: mod_base = OTHER; note = 2'-O-methylguanosine-3'-phosphate
  modified_base 11: mod_base = OTHER; note = 2'-O-methylguanosine-3'-phosphate
  modified_base 13: mod_base = OTHER; note = 2'-O-methyluridine-3'-phosphate
  modified_base 14: mod_base = OTHER; note = 2'-fluoroguanosine-3'-phosphate
  modified_base 15: mod_base = OTHER; note = 2'-O-methyladenosine-3'-phosphate
  modified_base 16: mod_base = OTHER; note = 2'-O-methyluridine-3'-phosphate
  modified_base 17: mod_base = OTHER; note = 2'-O-methyluridine-3'-phosphate
  modified_base 18: mod_base = OTHER; note = 2'-O-methyluridine-3'-phosphate
  modified_base 19: mod_base = OTHER; note = 2'-O-methyladenosine-3'-phosphate
  modified_base 20: mod_base = OTHER; note = 2'-O-methylcytidine-3'-phosphate
  modified_base 21: mod_base = OTHER; note = 2'-O-methyladenosine-3'-phosphorothioate
  modified_base 22: mod_base = OTHER; note = 2'-O-methylguanosine-3'-phosphorothioate
  modified_base 23: mod_base = OTHER; note = 2'-O-methylguanosine-3'-phosphate
  misc_feature 1: note = RNA
  misc_feature 2: note = DNA
  misc_feature 3..4: note = RNA
  misc_feature 5: note = DNA
  misc_feature 6: note = RNA
  misc_feature 7: note = DNA
  misc_feature 8..11: note = RNA
  misc_feature 12: note = DNA
  misc_feature 13..23: note = RNA
ttacctaaaggatgatttacagg

SEQ ID NO: 1162 - DNA, 23 bp, synthetic construct
  source 1..23: mol_type = other DNA
  modified_base 1: mod_base = OTHER; note = Vinyl-phosphonate-2'-O-methyluridine-3'-phosphate
  modified_base 3: mod_base = OTHER; note = 2'-O-methylcytidine-3'-phosphate
  modified_base 4: mod_base = OTHER; note = 2'-O-methylcytidine-3'-phosphate
  modified_base 6: mod_base = OTHER; note = 2'-O-methyluridine-3'-phosphate
  modified_base 8: mod_base = OTHER; note = 2'-O-methylcytidine-3'-phosphate
  modified_base 9: mod_base = OTHER; note = 2'-O-methylcytidine-3'-phosphate
  modified_base 10: mod_base = OTHER; note = 2'-O-methyladenosine-3'-phosphate
  modified_base 11: mod_base = OTHER; note = 2'-O-methyladenosine-3'-phosphate
  modified_base 13: mod_base = OTHER; note = 2'-O-methylcytidine-3'-phosphate
  modified_base 14: mod_base = OTHER; note = 2'-fluoroadenosine-3'-phosphate
  modified_base 15: mod_base = OTHER; note = 2'-O-methyladenosine-3'-phosphate
  modified_base 16: mod_base = OTHER; note = 2'-O-methylguanosine-3'-phosphate
  modified_base 17: mod_base = OTHER; note = 2'-O-methyluridine-3'-phosphate
  modified_base 18: mod_base = OTHER; note = 2'-O-methylcytidine-3'-phosphate
  modified_base 19: mod_base = OTHER; note = 2'-O-methyluridine-3'-phosphate
  modified_base 20: mod_base = OTHER; note = 2'-O-methyluridine-3'-phosphate
  modified_base 21: mod_base = OTHER; note = 2'-O-methyluridine-3'-phosphorothioate
  modified_base 22: mod_base = OTHER; note = 2'-O-methylcytidine-3'-phosphorothioate
  modified_base 23: mod_base = OTHER; note = 2'-O-methyluridine-3'-phosphate
  misc_feature 1: note = RNA
  misc_feature 2: note = DNA
  misc_feature 3..4: note = RNA
  misc_feature 5: note = DNA
  misc_feature 6: note = RNA
  misc_feature 7: note = DNA
  misc_feature 8..11: note = RNA
  misc_feature 12: note = DNA
  misc_feature 13..23: note = RNA
taccctaccaaccaagtctttct

SEQ ID NO: 1163 - DNA, 23 bp, synthetic construct
  source 1..23: mol_type = other DNA
  modified_base 1: mod_base = OTHER; note = Vinyl-phosphonate-2'-O-methyluridine-3'-phosphate
  modified_base 2: mod_base = OTHER; note = 2'-fluoroadenosine-3'-phosphate
  modified_base 3: mod_base = OTHER; note = 2'-O-methyladenosine-3'-phosphate
  modified_base 4: mod_base = OTHER; note = 2'-O-methylguanosine-3'-phosphate
  modified_base 6: mod_base = OTHER; note = 2'-O-methylcytidine-3'-phosphate
  modified_base 7: mod_base = OTHER; note = Adenosine-glycol nucleic acid (GNA)
  modified_base 8: mod_base = OTHER; note = 2'-O-methyluridine-3'-phosphate
  modified_base 9: mod_base = OTHER; note = 2'-O-methylcytidine-3'-phosphate
  modified_base 10: mod_base = OTHER; note = 2'-O-methyluridine-3'-phosphate
  modified_base 11: mod_base = OTHER; note = 2'-O-methylcytidine-3'-phosphate
  modified_base 12: mod_base = OTHER; note = 2'-O-methylcytidine-3'-phosphate
  modified_base 13: mod_base = OTHER; note = 2'-O-methyluridine-3'-phosphate
  modified_base 14: mod_base = OTHER; note = 2'-fluorouridine-3'-phosphate
  modified_base 15: mod_base = OTHER; note = 2'-O-methyluridine-3'-phosphate
  modified_base 16: mod_base = OTHER; note = 2'-fluorocytidine-3'-phosphate
  modified_base 17: mod_base = OTHER; note = 2'-O-methyladenosine-3'-phosphate
  modified_base 18: mod_base = OTHER; note = 2'-O-methyladenosine-3'-phosphate
  modified_base 19: mod_base = OTHER; note = 2'-O-methyladenosine-3'-phosphate
  modified_base 20: mod_base = OTHER; note = 2'-O-methylguanosine-3'-phosphate
  modified_base 21: mod_base = OTHER; note = 2'-O-methyluridine-3'-phosphorothioate
  modified_base 22: mod_base = OTHER; note = 2'-O-methyladenosine-3'-phosphorothioate
  modified_base 23: mod_base = OTHER; note = 2'-O-methyluridine-3'-phosphate
  misc_feature 1..4: note = RNA
  misc_feature 5: note = DNA
  misc_feature 6..23: note = RNA
taagacatctcctttcaaagtat

SEQ ID NO: 1164 - DNA, 23 bp, synthetic construct
  source 1..23: mol_type = other DNA
  modified_base 1: mod_base = OTHER; note = Vinyl-phosphonate-2'-O-methyluridine-3'-phosphate
  modified_base 3: mod_base = OTHER; note = 2'-O-methyladenosine-3'-phosphate
  modified_base 4: mod_base = OTHER; note = 2'-O-methylguanosine-3'-phosphate
  modified_base 6: mod_base = OTHER; note = 2'-O-methylcytidine-3'-phosphate
  modified_base 8: mod_base = OTHER; note = 2'-O-methyluridine-3'-phosphate
  modified_base 9: mod_base = OTHER; note = 2'-O-methylcytidine-3'-phosphate
  modified_base 10: mod_base = OTHER; note = 2'-O-methyluridine-3'-phosphate
  modified_base 11: mod_base = OTHER; note = 2'-O-methylcytidine-3'-phosphate
  modified_base 13: mod_base = OTHER; note = 2'-O-methyluridine-3'-phosphate
  modified_base 14: mod_base = OTHER; note = 2'-fluorouridine-3'-phosphate
  modified_base 15: mod_base = OTHER; note = 2'-O-methyluridine-3'-phosphate
  modified_base 16: mod_base = OTHER; note = 2'-O-methylcytidine-3'-phosphate
  modified_base 17: mod_base = OTHER; note = 2'-O-methyladenosine-3'-phosphate
  modified_base 18: mod_base = OTHER; note = 2'-O-methyladenosine-3'-phosphate
  modified_base 19: mod_base = OTHER; note = 2'-O-methyladenosine-3'-phosphate
  modified_base 20: mod_base = OTHER; note = 2'-O-methylguanosine-3'-phosphate
  modified_base 21: mod_base = OTHER; note = 2'-O-methyluridine-3'-phosphorothioate
  modified_base 22: mod_base = OTHER; note = 2'-O-methyladenosine-3'-phosphorothioate
  modified_base 23: mod_base = OTHER; note = 2'-O-methyluridine-3'-phosphate
  misc_feature 1: note = RNA
  misc_feature 2: note = DNA
  misc_feature 3..4: note = RNA
  misc_feature 5: note = DNA
  misc_feature 6: note = RNA
  misc_feature 7: note = DNA
  misc_feature 8..11: note = RNA
  misc_feature 12: note = DNA
  misc_feature 13..23: note = RNA
taagacatctcctttcaaagtat

SEQ ID NO: 1165 - DNA, 23 bp, synthetic construct
  source 1..23: mol_type = other DNA
  modified_base 1: mod_base = OTHER; note = Vinyl-phosphonate-2'-O-methyluridine-3'-phosphate
  modified_base 3: mod_base = OTHER; note = 2'-O-methyladenosine-3'-phosphate
  modified_base 4: mod_base = OTHER; note = 2'-O-methylcytidine-3'-phosphate
  modified_base 6: mod_base = OTHER; note = 2'-O-methyladenosine-3'-phosphate
  modified_base 8: mod_base = OTHER; note = 2'-O-methylcytidine-3'-phosphate
  modified_base 9: mod_base = OTHER; note = 2'-O-methyladenosine-3'-phosphate
  modified_base 10: mod_base = OTHER; note = 2'-O-methylguanosine-3'-phosphate
  modified_base 11: mod_base = OTHER; note = 2'-O-methyladenosine-3'-phosphate
  modified_base 13: mod_base = OTHER; note = 2'-O-methyladenosine-3'-phosphate
  modified_base 14: mod_base = OTHER; note = 2'-fluorouridine-3'-phosphate
  modified_base 15: mod_base = OTHER; note = 2'-O-methylcytidine-3'-phosphate
  modified_base 16: mod_base = OTHER; note = 2'-O-methyluridine-3'-phosphate
  modified_base 17: mod_base = OTHER; note = 2'-O-methylguanosine-3'-phosphate
  modified_base 18: mod_base = OTHER; note = 2'-O-methyladenosine-3'-phosphate
  modified_base 19: mod_base = OTHER; note = 2'-O-methylguanosine-3'-phosphate
  modified_base 20: mod_base = OTHER; note = 2'-O-methyladenosine-3'-phosphate
  modified_base 21: mod_base = OTHER; note = 2'-O-methyladenosine-3'-phosphorothioate
  modified_base 22: mod_base = OTHER; note = 2'-O-methylcytidine-3'-phosphorothioate
  modified_base 23: mod_base = OTHER; note = 2'-O-methyladenosine-3'-phosphate
  misc_feature 1: note = RNA
  misc_feature 2: note = DNA
  misc_feature 3..4: note = RNA
  misc_feature 5: note = DNA
  misc_feature 6: note = RNA
  misc_feature 7: note = DNA
  misc_feature 8..11: note = RNA
  misc_feature 12: note = DNA
  misc_feature 13..23: note = RNA
taacaaccagaaatctgagaaca

SEQ ID NO: 1166 - DNA, 23 bp, synthetic construct
  source 1..23: mol_type = other DNA
  modified_base 1: mod_base = OTHER; note = Vinyl-phosphonate-2'-O-methyluridine-3'-phosphate
  modified_base 2: mod_base = OTHER; note = 2'-fluorouridine-3'-phosphate
  modified_base 3: mod_base = OTHER; note = 2'-O-methyladenosine-3'-phosphate
  modified_base 4: mod_base = OTHER; note = 2'-O-methyladenosine-3'-phosphate
  modified_base 6: mod_base = OTHER; note = 2'-O-methyladenosine-3'-phosphate
  modified_base 7: mod_base = OTHER; note = Adenosine-glycol nucleic acid (GNA)
  modified_base 8: mod_base = OTHER; note = 2'-O-methylcytidine-3'-phosphate
  modified_base 9: mod_base = OTHER; note = 2'-O-methylcytidine-3'-phosphate
  modified_base 10: mod_base = OTHER; note = 2'-O-methyladenosine-3'-phosphate
  modified_base 11: mod_base = OTHER; note = 2'-O-methylguanosine-3'-phosphate
  modified_base 12: mod_base = OTHER; note = 2'-O-methyladenosine-3'-phosphate
  modified_base 13: mod_base = OTHER; note = 2'-O-methyladenosine-3'-phosphate
  modified_base 14: mod_base = OTHER; note = 2'-fluoroadenosine-3'-phosphate
  modified_base 15: mod_base = OTHER; note = 2'-O-methyluridine-3'-phosphate
  modified_base 16: mod_base = OTHER; note = 2'-fluorocytidine-3'-phosphate
  modified_base 17: mod_base = OTHER; note = 2'-O-methyluridine-3'-phosphate
  modified_base 18: mod_base = OTHER; note = 2'-O-methylguanosine-3'-phosphate
  modified_base 19: mod_base = OTHER; note = 2'-O-methyladenosine-3'-phosphate
  modified_base 20: mod_base = OTHER; note = 2'-O-methylguanosine-3'-phosphate
  modified_base 21: mod_base = OTHER; note = 2'-O-methyladenosine-3'-phosphorothioate
  modified_base 22: mod_base = OTHER; note = 2'-O-methyladenosine-3'-phosphorothioate
  modified_base 23: mod_base = OTHER; note = 2'-O-methylcytidine-3'-phosphate
  misc_feature 1..4: note = RNA
  misc_feature 5: note = DNA
  misc_feature 6..23: note = RNA
ttaacaaccagaaatctgagaac

SEQ ID NO: 1167 - DNA, 23 bp, synthetic construct
  source 1..23: mol_type = other DNA
  modified_base 1: mod_base = OTHER; note = Vinyl-phosphonate-2'-O-methyluridine-3'-phosphate
  modified_base 3: mod_base = OTHER; note = 2'-O-methyladenosine-3'-phosphate
  modified_base 4: mod_base = OTHER; note = 2'-O-methyladenosine-3'-phosphate
  modified_base 6: mod_base = OTHER; note = 2'-O-methyladenosine-3'-phosphate
  modified_base 8: mod_base = OTHER; note = 2'-O-methylcytidine-3'-phosphate
  modified_base 9: mod_base = OTHER; note = 2'-O-methylcytidine-3'-phosphate
  modified_base 10: mod_base = OTHER; note = 2'-O-methyladenosine-3'-phosphate
  modified_base 11: mod_base = OTHER; note = 2'-O-methylguanosine-3'-phosphate
  modified_base 13: mod_base = OTHER; note = 2'-O-methyladenosine-3'-phosphate
  modified_base 14: mod_base = OTHER; note = 2'-fluoroadenosine-3'-phosphate
  modified_base 15: mod_base = OTHER; note = 2'-O-methyluridine-3'-phosphate
  modified_base 16: mod_base = OTHER; note = 2'-O-methylcytidine-3'-phosphate
  modified_base 17: mod_base = OTHER; note = 2'-O-methyluridine-3'-phosphate
  modified_base 18: mod_base = OTHER; note = 2'-O-methylguanosine-3'-phosphate
  modified_base 19: mod_base = OTHER; note = 2'-O-methyladenosine-3'-phosphate
  modified_base 20: mod_base = OTHER; note = 2'-O-methylguanosine-3'-phosphate
  modified_base 21: mod_base = OTHER; note = 2'-O-methyladenosine-3'-phosphorothioate
  modified_base 22: mod_base = OTHER; note = 2'-O-methyladenosine-3'-phosphorothioate
  modified_base 23: mod_base = OTHER; note = 2'-O-methylcytidine-3'-phosphate
  misc_feature 1: note = RNA
  misc_feature 2: note = DNA
  misc_feature 3..4: note = RNA
  misc_feature 5: note = DNA
  misc_feature 6: note = RNA
  misc_feature 7: note = DNA
  misc_feature 8..11: note = RNA
  misc_feature 12: note = DNA
  misc_feature 13..23: note = RNA
ttaacaaccagaaatctgagaac

SEQ ID NO: 1168 - DNA, 23 bp, synthetic construct
  source 1..23: mol_type = other DNA
  modified_base 1: mod_base = OTHER; note = Vinyl-phosphonate-2'-O-methyluridine-3'-phosphate
  modified_base 3: mod_base = OTHER; note = 2'-O-methyluridine-3'-phosphate
  modified_base 4: mod_base = OTHER; note = 2'-O-methyladenosine-3'-phosphate
  modified_base 6: mod_base = OTHER; note = 2'-O-methylcytidine-3'-phosphate
  modified_base 8: mod_base = OTHER; note = 2'-O-methyladenosine-3'-phosphate
  modified_base 9: mod_base = OTHER; note = 2'-O-methylcytidine-3'-phosphate
  modified_base 10: mod_base = OTHER; note = 2'-O-methylcytidine-3'-phosphate
  modified_base 11: mod_base = OTHER; note = 2'-O-methyladenosine-3'-phosphate
  modified_base 13: mod_base = OTHER; note = 2'-O-methyladenosine-3'-phosphate
  modified_base 14: mod_base = OTHER; note = 2'-fluoroadenosine-3'-phosphate
  modified_base 15: mod_base = OTHER; note = 2'-O-methyladenosine-3'-phosphate
  modified_base 16: mod_base = OTHER; note = 2'-O-methyluridine-3'-phosphate
  modified_base 17: mod_base = OTHER; note = 2'-O-methylcytidine-3'-phosphate
  modified_base 18: mod_base = OTHER; note = 2'-O-methyluridine-3'-phosphate
  modified_base 19: mod_base = OTHER; note = 2'-O-methylguanosine-3'-phosphate
  modified_base 20: mod_base = OTHER; note = 2'-O-methyladenosine-3'-phosphate
  modified_base 21: mod_base = OTHER; note = 2'-O-methylguanosine-3'-phosphorothioate
  modified_base 22: mod_base = OTHER; note = 2'-O-methyladenosine-3'-phosphorothioate
  modified_base 23: mod_base = OTHER; note = 2'-O-methyladenosine-3'-phosphate
  misc_feature 1: note = RNA
  misc_feature 2: note = DNA
  misc_feature 3..4: note = RNA
  misc_feature 5: note = DNA
  misc_feature 6: note = RNA
  misc_feature 7: note = DNA
  misc_feature 8..11: note = RNA
  misc_feature 12: note = DNA
  misc_feature 13..23: note = RNA
tataacaaccagaaatctgagaa

SEQ ID NO: 1169 - DNA, 23 bp, synthetic construct
  source 1..23: mol_type = other DNA
  modified_base 1: mod_base = OTHER; note = Vinyl-phosphonate-2'-O-methyluridine-3'-phosphate
  modified_base 3: mod_base = OTHER; note = 2'-O-methylcytidine-3'-phosphate
  modified_base 4: mod_base = OTHER; note = 2'-O-methyladenosine-3'-phosphate
  modified_base 6: mod_base = OTHER; note = 2'-O-methyladenosine-3'-phosphate
  modified_base 8: mod_base = OTHER; note = 2'-O-methylguanosine-3'-phosphate
  modified_base 9: mod_base = OTHER; note = 2'-O-methyladenosine-3'-phosphate
  modified_base 10: mod_base = OTHER; note = 2'-O-methyluridine-3'-phosphate
  modified_base 11: mod_base = OTHER; note = 2'-O-methylcytidine-3'-phosphate
  modified_base 13: mod_base = OTHER; note = 2'-O-methylcytidine-3'-phosphate
  modified_base 14: mod_base = OTHER; note = 2'-fluoroadenosine-3'-phosphate
  modified_base 15: mod_base = OTHER; note = 2'-O-methyluridine-3'-phosphate
  modified_base 16: mod_base = OTHER; note = 2'-O-methyladenosine-3'-phosphate
  modified_base 17: mod_base = OTHER; note = 2'-O-methyladenosine-3'-phosphate
  modified_base 18: mod_base = OTHER; note = 2'-O-methylcytidine-3'-phosphate
  modified_base 19: mod_base = OTHER; note = 2'-O-methyladenosine-3'-phosphate
  modified_base 20: mod_base = OTHER; note = 2'-O-methyladenosine-3'-phosphate
  modified_base 21: mod_base = OTHER; note = 2'-O-methylcytidine-3'-phosphorothioate
  modified_base 22: mod_base = OTHER; note = 2'-O-methylcytidine-3'-phosphorothioate
  modified_base 23: mod_base = OTHER; note = 2'-O-methyladenosine-3'-phosphate
  misc_feature 1: note = RNA
  misc_feature 2: note = DNA
  misc_feature 3..4: note = RNA
  misc_feature 5: note = DNA
  misc_feature 6: note = RNA
  misc_feature 7: note = DNA
  misc_feature 8..11: note = RNA
  misc_feature 12: note = DNA
  misc_feature 13..23: note = RNA
tacacatgatcacataacaacca

SEQ ID NO: 1170 - DNA, 23 bp, synthetic construct
  source 1..23: mol_type = other DNA
  modified_base 1: mod_base = OTHER; note = Vinyl-phosphonate-2'-O-methyluridine-3'-phosphate
  modified_base 3: mod_base = OTHER; note = 2'-O-methyladenosine-3'-phosphate
  modified_base 4: mod_base = OTHER; note = 2'-O-methylcytidine-3'-phosphate
  modified_base 6: mod_base = OTHER; note = 2'-O-methylcytidine-3'-phosphate
  modified_base 8: mod_base = OTHER; note = 2'-O-methyluridine-3'-phosphate
  modified_base 9: mod_base = OTHER; note = 2'-O-methylguanosine-3'-phosphate
  modified_base 10: mod_base = OTHER; note = 2'-O-methyladenosine-3'-phosphate
  modified_base 11: mod_base = OTHER; note = 2'-O-methyluridine-3'-phosphate
  modified_base 13: mod_base = OTHER; note = 2'-O-methyladenosine-3'-phosphate
  modified_base 14: mod_base = OTHER; note = 2'-fluorocytidine-3'-phosphate
  modified_base 15: mod_base = OTHER; note = 2'-O-methyladenosine-3'-phosphate
  modified_base 16: mod_base = OTHER; note = 2'-O-methyluridine-3'-phosphate
  modified_base 17: mod_base = OTHER; note = 2'-O-methyladenosine-3'-phosphate
  modified_base 18: mod_base = OTHER; note = 2'-O-methyladenosine-3'-phosphate
  modified_base 19: mod_base = OTHER; note = 2'-O-methylcytidine-3'-phosphate
  modified_base 20: mod_base = OTHER; note = 2'-O-methyladenosine-3'-phosphate
  modified_base 21: mod_base = OTHER; note = 2'-O-methyladenosine-3'-phosphorothioate
  modified_base 22: mod_base = OTHER; note = 2'-O-methylcytidine-3'-phosphorothioate
  modified_base 23: mod_base = OTHER; note = 2'-O-methylcytidine-3'-phosphate
  misc_feature 1: note = RNA
  misc_feature 2: note = DNA
  misc_feature 3..4: note = RNA
  misc_feature 5: note = DNA
  misc_feature 6: note = RNA
  misc_feature 7: note = DNA
  misc_feature 8..11: note = RNA
  misc_feature 12: note = DNA
  misc_feature 13..23: note = RNA
tcacacatgatcacataacaacc

SEQ ID NO: 1171 - DNA, 23 bp, synthetic construct
  source 1..23: mol_type = other DNA
  modified_base 1: mod_base = OTHER; note = Vinyl-phosphonate-2'-O-methyluridine-3'-phosphate
  modified_base 2: mod_base = OTHER; note = 2'-fluorouridine-3'-phosphate
  modified_base 3: mod_base = OTHER; note = 2'-O-methyladenosine-3'-phosphate
  modified_base 4: mod_base = OTHER; note = 2'-O-methyladenosine-3'-phosphate
  modified_base 6: mod_base = OTHER; note = 2'-O-methyluridine-3'-phosphate
  modified_base 7: mod_base = OTHER; note = Thymidine-glycol nucleic acid (GNA) S-Isomer
  modified_base 8: mod_base = OTHER; note = 2'-O-methylcytidine-3'-phosphate
  modified_base 9: mod_base = OTHER; note = 2'-O-methylcytidine-3'-phosphate
  modified_base 10: mod_base = OTHER; note = 2'-O-methyladenosine-3'-phosphate
  modified_base 11: mod_base = OTHER; note = 2'-O-methylcytidine-3'-phosphate
  modified_base 12: mod_base = OTHER; note = 2'-O-methyladenosine-3'-phosphate
  modified_base 13: mod_base = OTHER; note = 2'-O-methylcytidine-3'-phosphate
  modified_base 14: mod_base = OTHER; note = 2'-fluoroadenosine-3'-phosphate
  modified_base 15: mod_base = OTHER; note = 2'-O-methyluridine-3'-phosphate
  modified_base 16: mod_base = OTHER; note = 2'-fluoroguanosine-3'-phosphate
  modified_base 17: mod_base = OTHER; note = 2'-O-methyladenosine-3'-phosphate
  modified_base 18: mod_base = OTHER; note = 2'-O-methyluridine-3'-phosphate
  modified_base 19: mod_base = OTHER; note = 2'-O-methylcytidine-3'-phosphate
  modified_base 20: mod_base = OTHER; note = 2'-O-methyladenosine-3'-phosphate
  modified_base 21: mod_base = OTHER; note = 2'-O-methylcytidine-3'-phosphorothioate
  modified_base 22: mod_base = OTHER; note = 2'-O-methyladenosine-3'-phosphorothioate
  modified_base 23: mod_base = OTHER; note = 2'-O-methyluridine-3'-phosphate
  misc_feature 1..4: note = RNA
  misc_feature 5: note = DNA
  misc_feature 6: note = RNA
  misc_feature 7: note = DNA
  misc_feature 8..23: note = RNA
ttaacttccacacatgatcacat

SEQ ID NO: 1172 - DNA, 23 bp, synthetic construct
  source 1..23: mol_type = other DNA
  modified_base 1: mod_base = OTHER; note = Vinyl-phosphonate-2'-O-methyluridine-3'-phosphate
  modified_base 3: mod_base = OTHER; note = 2'-O-methyladenosine-3'-phosphate
  modified_base 4: mod_base = OTHER; note = 2'-O-methyluridine-3'-phosphate
  modified_base 6: mod_base = OTHER; note = 2'-O-methyladenosine-3'-phosphate
  modified_base 8: mod_base = OTHER; note = 2'-O-methyluridine-3'-phosphate
  modified_base 9: mod_base = OTHER; note = 2'-O-methyluridine-3'-phosphate
  modified_base 10: mod_base = OTHER; note = 2'-O-methylcytidine-3'-phosphate
  modified_base 11: mod_base = OTHER; note = 2'-O-methylcytidine-3'-phosphate
  modified_base 13: mod_base = OTHER; note = 2'-O-methylcytidine-3'-phosphate
  modified_base 14: mod_base = OTHER; note = 2'-fluoroadenosine-3'-phosphate
  modified_base 15: mod_base = OTHER; note = 2'-O-methylcytidine-3'-phosphate
  modified_base 16: mod_base = OTHER; note = 2'-O-methyladenosine-3'-phosphate
  modified_base 17: mod_base = OTHER; note = 2'-O-methyluridine-3'-phosphate
  modified_base 18: mod_base = OTHER; note = 2'-O-methylguanosine-3'-phosphate
  modified_base 19: mod_base = OTHER; note = 2'-O-methyladenosine-3'-phosphate
  modified_base 20: mod_base = OTHER; note = 2'-O-methyluridine-3'-phosphate
  modified_base 21: mod_base = OTHER; note = 2'-O-methylcytidine-3'-phosphorothioate
  modified_base 22: mod_base = OTHER; note = 2'-O-methyladenosine-3'-phosphorothioate
  modified_base 23: mod_base = OTHER; note = 2'-O-methylcytidine-3'-phosphate
  misc_feature 1: note = RNA
  misc_feature 2: note = DNA
  misc_feature 3..4: note = RNA
  misc_feature 5: note = DNA
  misc_feature 6: note = RNA
  misc_feature 7: note = DNA
  misc_feature 8..11: note = RNA
  misc_feature 12: note = DNA
  misc_feature 13..23: note = RNA
taataacttccacacatgatcac

SEQ ID NO: 1173 - DNA, 23 bp, synthetic construct
  source 1..23: mol_type = other DNA
  modified_base 1: mod_base = OTHER; note = Vinyl-phosphonate-2'-O-methyluridine-3'-phosphate
  modified_base 3: mod_base = OTHER; note = 2'-O-methyladenosine-3'-phosphate
  modified_base 4: mod_base = OTHER; note = 2'-O-methyladenosine-3'-phosphate
  modified_base 6: mod_base = OTHER; note = 2'-O-methyladenosine-3'-phosphate
  modified_base 8: mod_base = OTHER; note = 2'-O-methylcytidine-3'-phosphate
  modified_base 9: mod_base = OTHER; note = 2'-O-methyluridine-3'-phosphate
  modified_base 10: mod_base = OTHER; note = 2'-O-methyluridine-3'-phosphate
  modified_base 11: mod_base = OTHER; note = 2'-O-methylcytidine-3'-phosphate
  modified_base 13: mod_base = OTHER; note = 2'-O-methyladenosine-3'-phosphate
  modified_base 14: mod_base = OTHER; note = 2'-fluorocytidine-3'-phosphate
  modified_base 15: mod_base = OTHER; note = 2'-O-methyladenosine-3'-phosphate
  modified_base 16: mod_base = OTHER; note = 2'-O-methylcytidine-3'-phosphate
  modified_base 17: mod_base = OTHER; note = 2'-O-methyladenosine-3'-phosphate
  modified_base 18: mod_base = OTHER; note = 2'-O-methyluridine-3'-phosphate
  modified_base 19: mod_base = OTHER; note = 2'-O-methylguanosine-3'-phosphate
  modified_base 20: mod_base = OTHER; note = 2'-O-methyladenosine-3'-phosphate
  modified_base 21: mod_base = OTHER; note = 2'-O-methyluridine-3'-phosphorothioate
  modified_base 22: mod_base = OTHER; note = 2'-O-methylcytidine-3'-phosphorothioate
  modified_base 23: mod_base = OTHER; note = 2'-O-methyladenosine-3'-phosphate
  misc_feature 1: note = RNA
  misc_feature 2: note = DNA
  misc_feature 3..4: note = RNA
  misc_feature 5: note = DNA
  misc_feature 6: note = RNA
  misc_feature 7: note = DNA
  misc_feature 8..11: note = RNA
  misc_feature 12: note = DNA
  misc_feature 13..23: note = RNA
ttaataacttccacacatgatca

SEQ ID NO: 1174 - DNA, 23 bp, synthetic construct
  source 1..23: mol_type = other DNA
  modified_base 1: mod_base = OTHER; note = Vinyl-phosphonate-2'-O-methyluridine-3'-phosphate
  modified_base 3: mod_base = OTHER; note = 2'-O-methyladenosine-3'-phosphate
  modified_base 4: mod_base = OTHER; note = 2'-O-methyluridine-3'-phosphate
  modified_base 6: mod_base = OTHER; note = 2'-O-methyluridine-3'-phosphate
  modified_base 8: mod_base = OTHER; note = 2'-O-methyladenosine-3'-phosphate
  modified_base 9: mod_base = OTHER; note = 2'-O-methylguanosine-3'-phosphate
  modified_base 10: mod_base = OTHER; note = 2'-O-methyluridine-3'-phosphate
  modified_base 11: mod_base = OTHER; note = 2'-O-methyladenosine-3'-phosphate
  modified_base 13: mod_base = OTHER; note = 2'-O-methyluridine-3'-phosphate
  modified_base 14: mod_base = OTHER; note = 2'-fluoroadenosine-3'-phosphate
  modified_base 15: mod_base = OTHER; note = 2'-O-methyladenosine-3'-phosphate
  modified_base 16: mod_base = OTHER; note = 2'-O-methylguanosine-3'-phosphate
  modified_base 17: mod_base = OTHER; note = 2'-O-methyluridine-3'-phosphate
  modified_base 18: mod_base = OTHER; note = 2'-O-methyluridine-3'-phosphate
  modified_base 19: mod_base = OTHER; note = 2'-O-methylguanosine-3'-phosphate
  modified_base 20: mod_base = OTHER; note = 2'-O-methylcytidine-3'-phosphate
  modified_base 21: mod_base = OTHER; note = 2'-O-methyladenosine-3'-phosphorothioate
  modified_base 22: mod_base = OTHER; note = 2'-O-methyladenosine-3'-phosphorothioate
  modified_base 23: mod_base = OTHER; note = 2'-O-methyladenosine-3'-phosphate
  misc_feature 1: note = RNA
  misc_feature 2: note = DNA
  misc_feature 3..4: note = RNA
  misc_feature 5: note = DNA
  misc_feature 6: note = RNA
  misc_feature 7: note = DNA
  misc_feature 8..11: note = RNA
  misc_feature 12: note = DNA
  misc_feature 13..23: note = RNA
tcatttgagtattaagttgcaaa

SEQ ID NO: 1175 - DNA, 23 bp, synthetic construct
  source 1..23: mol_type = other DNA
  modified_base 1: mod_base = OTHER; note = Vinyl-phosphonate-2'-O-methyluridine-3'-phosphate
  modified_base 2: mod_base = OTHER; note = 2'-fluoroguanosine-3'-phosphate
  modified_base 3: mod_base = OTHER; note = 2'-O-methylcytidine-3'-phosphate
  modified_base 4: mod_base = OTHER; note = 2'-O-methyluridine-3'-phosphate
  modified_base 6: mod_base = OTHER; note = 2'-O-methyluridine-3'-phosphate
  modified_base 7: mod_base = OTHER; note = Adenosine-glycol nucleic acid (GNA)
  modified_base 8: mod_base = OTHER; note = 2'-O-methyluridine-3'-phosphate
  modified_base 9: mod_base = OTHER; note = 2'-O-methyladenosine-3'-phosphate
  modified_base 10: mod_base = OTHER; note = 2'-O-methyladenosine-3'-phosphate
  modified_base 11: mod_base = OTHER; note = 2'-O-methyladenosine-3'-phosphate
  modified_base 12: mod_base = OTHER; note = 2'-O-methylguanosine-3'-phosphate
  modified_base 13: mod_base = OTHER; note = 2'-O-methyladenosine-3'-phosphate
  modified_base 14: mod_base = OTHER; note = 2'-fluoroguanosine-3'-phosphate
  modified_base 15: mod_base = OTHER; note = 2'-O-methyladenosine-3'-phosphate
  modified_base 16: mod_base = OTHER; note = 2'-fluoroguanosine-3'-phosphate
  modified_base 17: mod_base = OTHER; note = 2'-O-methyladenosine-3'-phosphate
  modified_base 18: mod_base = OTHER; note = 2'-O-methyladenosine-3'-phosphate
  modified_base 19: mod_base = OTHER; note = 2'-O-methyladenosine-3'-phosphate
  modified_base 20: mod_base = OTHER; note = 2'-O-methylguanosine-3'-phosphate
  modified_base 21: mod_base = OTHER; note = 2'-O-methylguanosine-3'-phosphorothioate
  modified_base 22: mod_base = OTHER; note = 2'-O-methylcytidine-3'-phosphorothioate
  modified_base 23: mod_base = OTHER; note = 2'-O-methyluridine-3'-phosphate
  misc_feature 1..4: note = RNA
  misc_feature 5: note = DNA
  misc_feature 6..23: note = RNA
tgctgtataaagagagaaaggct

SEQ ID NO: 1176 - DNA, 23 bp, synthetic construct
  source 1..23: mol_type = other DNA
  modified_base 1: mod_base = OTHER; note = Vinyl-phosphonate-2'-O-methyluridine-3'-phosphate
  modified_base 2: mod_base = OTHER; note = 2'-fluoroadenosine-3'-phosphate
  modified_base 3: mod_base = OTHER; note = 2'-O-methylguanosine-3'-phosphate
  modified_base 4: mod_base = OTHER; note = 2'-O-methyladenosine-3'-phosphate
  modified_base 6: mod_base = OTHER; note = 2'-O-methyladenosine-3'-phosphate
  modified_base 7: mod_base = OTHER; note = Adenosine-glycol nucleic acid (GNA)
  modified_base 8: mod_base = OTHER; note = 2'-O-methyluridine-3'-phosphate
  modified_base 9: mod_base = OTHER; note = 2'-O-methyladenosine-3'-phosphate
  modified_base 10: mod_base = OTHER; note = 2'-O-methylcytidine-3'-phosphate
  modified_base 11: mod_base = OTHER; note = 2'-O-methyladenosine-3'-phosphate
  modified_base 12: mod_base = OTHER; note = 2'-O-methylguanosine-3'-phosphate
  modified_base 13: mod_base = OTHER; note = 2'-O-methylcytidine-3'-phosphate
  modified_base 14: mod_base = OTHER; note = 2'-fluorouridine-3'-phosphate
  modified_base 15: mod_base = OTHER; note = 2'-O-methylguanosine-3'-phosphate
  modified_base 16: mod_base = OTHER; note = 2'-fluorouridine-3'-phosphate
  modified_base 17: mod_base = OTHER; note = 2'-O-methyladenosine-3'-phosphate
  modified_base 18: mod_base = OTHER; note = 2'-O-methyluridine-3'-phosphate
  modified_base 19: mod_base = OTHER; note = 2'-O-methyladenosine-3'-phosphate
  modified_base 20: mod_base = OTHER; note = 2'-O-methyladenosine-3'-phosphate
  modified_base 21: mod_base = OTHER; note = 2'-O-methyladenosine-3'-phosphorothioate
  modified_base 22: mod_base = OTHER; note = 2'-O-methylguanosine-3'-phosphorothioate
  modified_base 23: mod_base = OTHER; note = 2'-O-methyladenosine-3'-phosphate
  misc_feature 1..4: note = RNA
  misc_feature 5: note = DNA
  misc_feature 6..23: note = RNA
tagacaatacagctgtataaaga

SEQ ID NO: 1177 - DNA, 23 bp, synthetic construct
  source 1..23: mol_type = other DNA
  modified_base 1: mod_base = OTHER; note = Vinyl-phosphonate-2'-O-methyluridine-3'-phosphate
  modified_base 3: mod_base = OTHER; note = 2'-O-methylguanosine-3'-phosphate
  modified_base 4: mod_base = OTHER; note = 2'-O-methyladenosine-3'-phosphate
  modified_base 6: mod_base = OTHER; note = 2'-O-methyladenosine-3'-phosphate
  modified_base 8: mod_base = OTHER; note = 2'-O-methyluridine-3'-phosphate
  modified_base 9: mod_base = OTHER; note = 2'-O-methyladenosine-3'-phosphate
  modified_base 10: mod_base = OTHER; note = 2'-O-methylcytidine-3'-phosphate
  modified_base 11: mod_base = OTHER; note = 2'-O-methyladenosine-3'-phosphate
  modified_base 13: mod_base = OTHER; note = 2'-O-methylcytidine-3'-phosphate
  modified_base 14: mod_base = OTHER; note = 2'-fluorouridine-3'-phosphate
  modified_base 15: mod_base = OTHER; note = 2'-O-methylguanosine-3'-phosphate
  modified_base 16: mod_base = OTHER; note = 2'-O-methyluridine-3'-phosphate
  modified_base 17: mod_base = OTHER; note = 2'-O-methyladenosine-3'-phosphate
  modified_base 18: mod_base = OTHER; note = 2'-O-methyluridine-3'-phosphate
  modified_base 19: mod_base = OTHER; note = 2'-O-methyladenosine-3'-phosphate
  modified_base 20: mod_base = OTHER; note = 2'-O-methyladenosine-3'-phosphate
  modified_base 21: mod_base = OTHER; note = 2'-O-methyladenosine-3'-phosphorothioate
  modified_base 22: mod_base = OTHER; note = 2'-O-methylguanosine-3'-phosphorothioate
  modified_base 23: mod_base = OTHER; note = 2'-O-methyladenosine-3'-phosphate
  misc_feature 1: note = RNA
  misc_feature 2: note = DNA
  misc_feature 3..4: note = RNA
  misc_feature 5: note = DNA
  misc_feature 6: note = RNA
  misc_feature 7: note = DNA
  misc_feature 8..11: note = RNA
  misc_feature 12: note = DNA
  misc_feature 13..23: note = RNA
tagacaatacagctgtataaaga

SEQ ID NO: 1178 - DNA, 23 bp, synthetic construct
  source 1..23: mol_type = other DNA
  modified_base 1: mod_base = OTHER; note = Vinyl-phosphonate-2'-O-methyluridine-3'-phosphate
  modified_base 3: mod_base = OTHER; note = 2'-O-methylcytidine-3'-phosphate
  modified_base 4: mod_base = OTHER; note = 2'-O-methyladenosine-3'-phosphate
  modified_base 6: mod_base = OTHER; note = 2'-O-methyluridine-3'-phosphate
  modified_base 8: mod_base = OTHER; note = 2'-O-methylcytidine-3'-phosphate
  modified_base 9: mod_base = OTHER; note = 2'-O-methyladenosine-3'-phosphate
  modified_base 10: mod_base = OTHER; note = 2'-O-methyladenosine-3'-phosphate
  modified_base 11: mod_base = OTHER; note = 2'-O-methylguanosine-3'-phosphate
  modified_base 13: mod_base = OTHER; note = 2'-O-methyluridine-3'-phosphate
  modified_base 14: mod_base = OTHER; note = 2'-fluorocytidine-3'-phosphate
  modified_base 15: mod_base = OTHER; note = 2'-O-methyladenosine-3'-phosphate
  modified_base 16: mod_base = OTHER; note = 2'-O-methylguanosine-3'-phosphate
  modified_base 17: mod_base = OTHER; note = 2'-O-methyladenosine-3'-phosphate
  modified_base 18: mod_base = OTHER; note = 2'-O-methylcytidine-3'-phosphate
  modified_base 19: mod_base = OTHER; note = 2'-O-methyladenosine-3'-phosphate
  modified_base 20: mod_base = OTHER; note = 2'-O-methyladenosine-3'-phosphate
  modified_base 21: mod_base = OTHER; note = 2'-O-methyluridine-3'-phosphorothioate
  modified_base 22: mod_base = OTHER; note = 2'-O-methyladenosine-3'-phosphorothioate
  modified_base 23: mod_base = OTHER; note = 2'-O-methylcytidine-3'-phosphate
  misc_feature 1: note = RNA
  misc_feature 2: note = DNA
  misc_feature 3..4: note = RNA
  misc_feature 5: note = DNA
  misc_feature 6: note = RNA
  misc_feature 7: note = DNA
  misc_feature 8..11: note = RNA
  misc_feature 12: note = DNA
  misc_feature 13..23: note = RNA
tacaatgcaagttcagacaatac

SEQ ID NO: 1179 - DNA, 23 bp, synthetic construct
  source 1..23: mol_type = other DNA
  modified_base 1: mod_base = OTHER; note = Vinyl-phosphonate-2'-O-methyluridine-3'-phosphate
  modified_base 2: mod_base = OTHER; note = 2'-fluorouridine-3'-phosphate
  modified_base 3: mod_base = OTHER; note = 2'-O-methylcytidine-3'-phosphate
  modified_base 4: mod_base = OTHER; note = 2'-O-methyladenosine-3'-phosphate
  modified_base 6: mod_base = OTHER; note = 2'-O-methylcytidine-3'-phosphate
  modified_base 7: mod_base = OTHER; note = Adenosine-glycol nucleic acid (GNA)
  modified_base 8: mod_base = OTHER; note = 2'-O-methyladenosine-3'-phosphate
  modified_base 9: mod_base = OTHER; note = 2'-O-methylcytidine-3'-phosphate
  modified_base 10: mod_base = OTHER; note = 2'-O-methyluridine-3'-phosphate
  modified_base 11: mod_base = OTHER; note = 2'-O-methylcytidine-3'-phosphate
  modified_base 12: mod_base = OTHER; note = 2'-O-methyluridine-3'-phosphate
  modified_base 13: mod_base = OTHER; note = 2'-O-methyladenosine-3'-phosphate
  modified_base 14: mod_base = OTHER; note = 2'-fluorocytidine-3'-phosphate
  modified_base 15: mod_base = OTHER; note = 2'-O-methyladenosine-3'-phosphate
  modified_base 16: mod_base = OTHER; note = 2'-fluoroguanosine-3'-phosphate
  modified_base 17: mod_base = OTHER; note = 2'-O-methylguanosine-3'-phosphate
  modified_base 18: mod_base = OTHER; note = 2'-O-methylcytidine-3'-phosphate
  modified_base 19: mod_base = OTHER; note = 2'-O-methylcytidine-3'-phosphate
  modified_base 20: mod_base = OTHER; note = 2'-O-methyladenosine-3'-phosphate
  modified_base 21: mod_base = OTHER; note = 2'-O-methyladenosine-3'-phosphorothioate
  modified_base 22: mod_base = OTHER; note = 2'-O-methyluridine-3'-phosphorothioate
  modified_base 23: mod_base = OTHER; note = 2'-O-methylcytidine-3'-phosphate
  misc_feature 1..4: note = RNA
  misc_feature 5: note = DNA
  misc_feature 6..23: note = RNA
ttcagcaactctacaggccaatc

SEQ ID NO: 1180 - DNA, 23 bp, synthetic construct
  source 1..23: mol_type = other DNA
  modified_base 1: mod_base = OTHER; note = Vinyl-phosphonate-2'-O-methyluridine-3'-phosphate
  modified_base 2: mod_base = OTHER; note = 2'-fluorouridine-3'-phosphate
  modified_base 3: mod_base = OTHER; note = 2'-O-methylguanosine-3'-phosphate
  modified_base 4: mod_base = OTHER; note = 2'-O-methylguanosine-3'-phosphate
  modified_base 6: mod_base = OTHER; note = 2'-O-methyluridine-3'-phosphate
  modified_base 7: mod_base = OTHER; note = Adenosine-glycol nucleic acid (GNA)
  modified_base 8: mod_base = OTHER; note = 2'-O-methylguanosine-3'-phosphate
  modified_base 9: mod_base = OTHER; note = 2'-O-methyluridine-3'-phosphate
  modified_base 10: mod_base = OTHER; note = 2'-O-methylguanosine-3'-phosphate
  modified_base 11: mod_base = OTHER; note = 2'-O-methyluridine-3'-phosphate
  modified_base 12: mod_base = OTHER; note = 2'-O-methylguanosine-3'-phosphate
  modified_base 13: mod_base = OTHER; note = 2'-O-methyluridine-3'-phosphate
  modified_base 14: mod_base = OTHER; note = 2'-fluorocytidine-3'-phosphate
  modified_base 15: mod_base = OTHER; note = 2'-O-methyladenosine-3'-phosphate
  modified_base 16: mod_base = OTHER; note = 2'-fluoroguanosine-3'-phosphate
  modified_base 17: mod_base = OTHER; note = 2'-O-methylguanosine-3'-phosphate
  modified_base 18: mod_base = OTHER; note = 2'-O-methylcytidine-3'-phosphate
  modified_base 19: mod_base = OTHER; note = 2'-O-methyladenosine-3'-phosphate
  modified_base 20: mod_base = OTHER; note = 2'-O-methylcytidine-3'-phosphate
  modified_base 21: mod_base = OTHER; note = 2'-O-methyluridine-3'-phosphorothioate
  modified_base 22: mod_base = OTHER; note = 2'-O-methyluridine-3'-phosphorothioate
  modified_base 23: mod_base = OTHER; note = 2'-O-methyluridine-3'-phosphate
  misc_feature 1..4: note = RNA
  misc_feature 5: note = DNA
  misc_feature 6..23: note = RNA
ttggttagtgtgtcaggcacttt

SEQ ID NO: 1181 - DNA, 23 bp, synthetic construct
  source 1..23: mol_type = other DNA
  modified_base 1: mod_base = OTHER; note = Vinyl-phosphonate-2'-O-methyluridine-3'-phosphate
  modified_base 3: mod_base = OTHER; note = 2'-O-methyladenosine-3'-phosphate
  modified_base 4: mod_base = OTHER; note = 2'-O-methylguanosine-3'-phosphate
  modified_base 6: mod_base = OTHER; note = 2'-O-methyluridine-3'-phosphate
  modified_base 8: mod_base = OTHER; note = 2'-O-methylguanosine-3'-phosphate
  modified_base 9: mod_base = OTHER; note = 2'-O-methylguanosine-3'-phosphate
  modified_base 10: mod_base = OTHER; note = 2'-O-methyluridine-3'-phosphate
  modified_base 11: mod_base = OTHER; note = 2'-O-methyluridine-3'-phosphate
  modified_base 13: mod_base = OTHER; note = 2'-O-methylguanosine-3'-phosphate
  modified_base 14: mod_base = OTHER; note = 2'-fluorouridine-3'-phosphate
  modified_base 15: mod_base = OTHER; note = 2'-O-methylguanosine-3'-phosphate
  modified_base 16: mod_base = OTHER; note = 2'-O-methyluridine-3'-phosphate
  modified_base 17: mod_base = OTHER; note = 2'-O-methylguanosine-3'-phosphate
  modified_base 18: mod_base = OTHER; note = 2'-O-methyluridine-3'-phosphate
  modified_base 19: mod_base = OTHER; note = 2'-O-methylcytidine-3'-phosphate
  modified_base 20: mod_base = OTHER; note = 2'-O-methyladenosine-3'-phosphate
  modified_base 21: mod_base = OTHER; note = 2'-O-methylguanosine-3'-phosphorothioate
  modified_base 22: mod_base = OTHER; note = 2'-O-methylguanosine-3'-phosphorothioate
  modified_base 23: mod_base = OTHER; note = 2'-O-methylcytidine-3'-phosphate
  misc_feature 1: note = RNA
  misc_feature 2: note = DNA
  misc_feature 3..4: note = RNA
  misc_feature 5: note = DNA
  misc_feature 6: note = RNA
  misc_feature 7: note = DNA
  misc_feature 8..11: note = RNA
  misc_feature 12: note = DNA
  misc_feature 13..23: note = RNA
tcagcttggttagtgtgtcaggc

SEQ ID NO: 1182 - DNA, 23 bp, synthetic construct
  source 1..23: mol_type = other DNA
  modified_base 1: mod_base = OTHER; note = Vinyl-phosphonate-2'-O-methyluridine-3'-phosphate
  modified_base 3: mod_base = OTHER; note = 2'-O-methyladenosine-3'-phosphate
  modified_base 4: mod_base = OTHER; note = 2'-O-methylguanosine-3'-phosphate
  modified_base 6: mod_base = OTHER; note = 2'-O-methyladenosine-3'-phosphate
  modified_base 8: mod_base = OTHER; note = 2'-O-methyladenosine-3'-phosphate
  modified_base 9: mod_base = OTHER; note = 2'-O-methylcytidine-3'-phosphate
  modified_base 10: mod_base = OTHER; note = 2'-O-methyluridine-3'-phosphate
  modified_base 11: mod_base = OTHER; note = 2'-O-methylcytidine-3'-phosphate
  modified_base 13: mod_base = OTHER; note = 2'-O-methylguanosine-3'-phosphate
  modified_base 14: mod_base = OTHER; note = 2'-fluorocytidine-3'-phosphate
  modified_base 15: mod_base = OTHER; note = 2'-O-methyluridine-3'-phosphate
  modified_base 16: mod_base = OTHER; note = 2'-O-methyluridine-3'-phosphate
  modified_base 17: mod_base = OTHER; note = 2'-O-methylguanosine-3'-phosphate
  modified_base 18: mod_base = OTHER; note = 2'-O-methylguanosine-3'-phosphate
  modified_base 19: mod_base = OTHER; note = 2'-O-methyluridine-3'-phosphate
  modified_base 20: mod_base = OTHER; note = 2'-O-methyluridine-3'-phosphate
  modified_base 21: mod_base = OTHER; note = 2'-O-methyladenosine-3'-phosphorothioate
  modified_base 22: mod_base = OTHER; note = 2'-O-methylguanosine-3'-phosphorothioate
  modified_base 23: mod_base = OTHER; note = 2'-O-methyluridine-3'-phosphate
  misc_feature 1: note = RNA
  misc_feature 2: note = DNA
  misc_feature 3..4: note = RNA
  misc_feature 5: note = DNA
  misc_feature 6: note = RNA
  misc_feature 7: note = DNA
  misc_feature 8..11: note = RNA
  misc_feature 12: note = DNA
  misc_feature 13..23: note = RNA
ttaggaaactcagcttggttagt

SEQ ID NO: 1183 - DNA, 23 bp, synthetic construct
  source 1..23: mol_type = other DNA
  modified_base 1: mod_base = OTHER; note = Vinyl-phosphonate-2'-O-methyluridine-3'-phosphate
  modified_base 2: mod_base = OTHER; note = 2'-fluorouridine-3'-phosphate
  modified_base 3: mod_base = OTHER; note = 2'-O-methyluridine-3'-phosphate
  modified_base 4: mod_base = OTHER; note = 2'-O-methylcytidine-3'-phosphate
  modified_base 6: mod_base = OTHER; note = 2'-O-methylcytidine-3'-phosphate
  modified_base 7: mod_base = OTHER; note = Adenosine-glycol nucleic acid (GNA)
  modified_base 8: mod_base = OTHER; note = 2'-O-methyluridine-3'-phosphate
  modified_base 9: mod_base = OTHER; note = 2'-O-methyladenosine-3'-phosphate
  modified_base 10: mod_base = OTHER; note = 2'-O-methylguanosine-3'-phosphate
  modified_base 11: mod_base = OTHER; note = 2'-O-methylguanosine-3'-phosphate
  modified_base 12: mod_base = OTHER; note = 2'-O-methyladenosine-3'-phosphate
  modified_base 13: mod_base = OTHER; note = 2'-O-methyladenosine-3'-phosphate
  modified_base 14: mod_base = OTHER; note = 2'-fluoroadenosine-3'-phosphate
  modified_base 15: mod_base = OTHER; note = 2'-O-methylcytidine-3'-phosphate
  modified_base 16: mod_base = OTHER; note = 2'-fluorouridine-3'-phosphate
  modified_base 17: mod_base = OTHER; note = 2'-O-methylcytidine-3'-phosphate
  modified_base 18: mod_base = OTHER; note = 2'-O-methyladenosine-3'-phosphate
  modified_base 19: mod_base = OTHER; note = 2'-O-methylguanosine-3'-phosphate
  modified_base 20: mod_base = OTHER; note = 2'-O-methylcytidine-3'-phosphate
  modified_base 21: mod_base = OTHER; note = 2'-O-methyluridine-3'-phosphorothioate
  modified_base 22: mod_base = OTHER; note = 2'-O-methyluridine-3'-phosphorothioate
  modified_base 23: mod_base = OTHER; note = 2'-O-methylguanosine-3'-phosphate
  misc_feature 1..4: note = RNA
  misc_feature 5: note = DNA
  misc_feature 6..23: note = RNA
tttcccataggaaactcagcttg

SEQ ID NO: 1184 - DNA, 23 bp, synthetic construct
  source 1..23: mol_type = other DNA
  modified_base 1: mod_base = OTHER; note = Vinyl-phosphonate-2'-O-methyluridine-3'-phosphate
  modified_base 3: mod_base = OTHER; note = 2'-O-methylcytidine-3'-phosphate
  modified_base 4: mod_base = OTHER; note = 2'-O-methyladenosine-3'-phosphate
  modified_base 6: mod_base = OTHER; note = 2'-O-methyluridine-3'-phosphate
  modified_base 8: mod_base = OTHER; note = 2'-O-methylguanosine-3'-phosphate
  modified_base 9: mod_base = OTHER; note = 2'-O-methyluridine-3'-phosphate
  modified_base 10: mod_base = OTHER; note = 2'-O-methyluridine-3'-phosphate
  modified_base 11: mod_base = OTHER; note = 2'-O-methylcytidine-3'-phosphate
  modified_base 13: mod_base = OTHER; note = 2'-O-methylcytidine-3'-phosphate
  modified_base 14: mod_base = OTHER; note = 2'-fluoroadenosine-3'-phosphate
  modified_base 15: mod_base = OTHER; note = 2'-O-methyluridine-3'-phosphate
  modified_base 16: mod_base = OTHER; note = 2'-O-methyladenosine-3'-phosphate
  modified_base 17: mod_base = OTHER; note = 2'-O-methylguanosine-3'-phosphate
  modified_base 18: mod_base = OTHER; note = 2'-O-methylguanosine-3'-phosphate
  modified_base 19: mod_base = OTHER; note = 2'-O-methyladenosine-3'-phosphate
  modified_base 20: mod_base = OTHER; note = 2'-O-methyladenosine-3'-phosphate
  modified_base 21: mod_base = OTHER; note = 2'-O-methyladenosine-3'-phosphorothioate
  modified_base 22: mod_base = OTHER; note = 2'-O-methylcytidine-3'-phosphorothioate
  modified_base 23: mod_base = OTHER; note = 2'-O-methyluridine-3'-phosphate
  misc_feature 1: note = RNA
  misc_feature 2: note = DNA
  misc_feature 3..4: note = RNA
  misc_feature 5: note = DNA
  misc_feature 6: note = RNA
  misc_feature 7: note = DNA
  misc_feature 8..11: note = RNA
  misc_feature 12: note = DNA
  misc_feature 13..23: note = RNA
ttcaattgttcccataggaaact

SEQ ID NO: 1185 - DNA, 23 bp, synthetic construct
  source 1..23: mol_type = other DNA
  modified_base 1: mod_base = OTHER; note = Vinyl-phosphonate-2'-O-methyluridine-3'-phosphate
  modified_base 2: mod_base = OTHER; note = 2'-fluorouridine-3'-phosphate
  modified_base 3: mod_base = OTHER; note = 2'-O-methyluridine-3'-phosphate
  modified_base 4: mod_base = OTHER; note = 2'-O-methylguanosine-3'-phosphate
  modified_base 6: mod_base = OTHER; note = 2'-O-methyladenosine-3'-phosphate
  modified_base 7: mod_base = OTHER; note = Thymidine-glycol nucleic acid (GNA) S-Isomer
  modified_base 8: mod_base = OTHER; note = 2'-O-methyluridine-3'-phosphate
  modified_base 9: mod_base = OTHER; note = 2'-O-methylguanosine-3'-phosphate
  modified_base 10: mod_base = OTHER; note = 2'-O-methyluridine-3'-phosphate
  modified_base 11: mod_base = OTHER; note = 2'-O-methyluridine-3'-phosphate
  modified_base 12: mod_base = OTHER; note = 2'-O-methyladenosine-3'-phosphate
  modified_base 13: mod_base = OTHER; note = 2'-O-methylcytidine-3'-phosphate
  modified_base 14: mod_base = OTHER; note = 2'-fluorouridine-3'-phosphate
  modified_base 15: mod_base = OTHER; note = 2'-O-methylcytidine-3'-phosphate
  modified_base 16: mod_base = OTHER; note = 2'-fluorocytidine-3'-phosphate
  modified_base 17: mod_base = OTHER; note = 2'-O-methyluridine-3'-phosphate
  modified_base 18: mod_base = OTHER; note = 2'-O-methylcytidine-3'-phosphate
  modified_base 19: mod_base = OTHER; note = 2'-O-methylguanosine-3'-phosphate
  modified_base 20: mod_base = OTHER; note = 2'-O-methyladenosine-3'-phosphate
  modified_base 21: mod_base = OTHER; note = 2'-O-methylcytidine-3'-phosphorothioate
  modified_base 22: mod_base = OTHER; note = 2'-O-methylcytidine-3'-phosphorothioate
  modified_base 23: mod_base = OTHER; note = 2'-O-methyladenosine-3'-phosphate
  misc_feature 1..4: note = RNA
  misc_feature 5: note = DNA
  misc_feature 6: note = RNA
  misc_feature 7: note = DNA
  misc_feature 8..23: note = RNA
tttgtattgttactcctcgacca

SEQ ID NO: 1186 - DNA, 23 bp, synthetic construct
  source 1..23: mol_type = other DNA
  modified_base 1: mod_base = OTHER; note = Vinyl-phosphonate-2'-O-methyluridine-3'-phosphate
  modified_base 3: mod_base = OTHER; note = 2'-O-methyluridine-3'-phosphate
  modified_base 4: mod_base = OTHER; note = 2'-O-methylguanosine-3'-phosphate
  modified_base 6: mod_base = OTHER; note = 2'-O-methyladenosine-3'-phosphate
  modified_base 8: mod_base = OTHER; note = 2'-O-methyluridine-3'-phosphate
  modified_base 9: mod_base = OTHER; note = 2'-O-methylguanosine-3'-phosphate
  modified_base 10: mod_base = OTHER; note = 2'-O-methyluridine-3'-phosphate
  modified_base 11: mod_base = OTHER; note = 2'-O-methyluridine-3'-phosphate
  modified_base 13: mod_base = OTHER; note = 2'-O-methylcytidine-3'-phosphate
  modified_base 14: mod_base = OTHER; note = 2'-fluorouridine-3'-phosphate
  modified_base 15: mod_base = OTHER; note = 2'-O-methylcytidine-3'-phosphate
  modified_base 16: mod_base = OTHER; note = 2'-O-methylcytidine-3'-phosphate
  modified_base 17: mod_base = OTHER; note = 2'-O-methyluridine-3'-phosphate
  modified_base 18: mod_base = OTHER; note = 2'-O-methylcytidine-3'-phosphate
  modified_base 19: mod_base = OTHER; note = 2'-O-methylguanosine-3'-phosphate
  modified_base 20: mod_base = OTHER; note = 2'-O-methyladenosine-3'-phosphate
  modified_base 21: mod_base = OTHER; note = 2'-O-methylcytidine-3'-phosphorothioate
  modified_base 22: mod_base = OTHER; note = 2'-O-methylcytidine-3'-phosphorothioate
  modified_base 23: mod_base = OTHER; note = 2'-O-methyladenosine-3'-phosphate
  misc_feature 1: note = RNA
  misc_feature 2: note = DNA
  misc_feature 3..4: note = RNA
  misc_feature 5: note = DNA
  misc_feature 6: note = RNA
  misc_feature 7: note = DNA
  misc_feature 8..11: note = RNA
  misc_feature 12: note = DNA
  misc_feature 13..23: note = RNA
tttgtattgttactcctcgacca

SEQ ID NO: 1187 - DNA, 23 bp, synthetic construct
  source 1..23: mol_type = other DNA
  modified_base 1: mod_base = OTHER; note = Vinyl-phosphonate-2'-O-methyluridine-3'-phosphate
  modified_base 2: mod_base = OTHER; note = 2'-fluoroadenosine-3'-phosphate
  modified_base 3: mod_base = OTHER; note = 2'-O-methyladenosine-3'-phosphate
  modified_base 4: mod_base = OTHER; note = 2'-O-methylguanosine-3'-phosphate
  modified_base 6: mod_base = OTHER; note = 2'-O-methyladenosine-3'-phosphate
  modified_base 7: mod_base = OTHER; note = Adenosine-glycol nucleic acid (GNA)
  modified_base 8: mod_base = OTHER; note = 2'-O-methylguanosine-3'-phosphate
  modified_base 9: mod_base = OTHER; note = 2'-O-methylguanosine-3'-phosphate
  modified_base 10: mod_base = OTHER; note = 2'-O-methylcytidine-3'-phosphate
  modified_base 11: mod_base = OTHER; note = 2'-O-methyluridine-3'-phosphate
  modified_base 12: mod_base = OTHER; note = 2'-O-methyladenosine-3'-phosphate
  modified_base 13: mod_base = OTHER; note = 2'-O-methylguanosine-3'-phosphate
  modified_base 14: mod_base = OTHER; note = 2'-fluoroguanosine-3'-phosphate
  modified_base 15: mod_base = OTHER; note = 2'-O-methylguanosine-3'-phosphate
  modified_base 16: mod_base = OTHER; note = 2'-fluorouridine-3'-phosphate
  modified_base 17: mod_base = OTHER; note = 2'-O-methyluridine-3'-phosphate
  modified_base 18: mod_base = OTHER; note = 2'-O-methyluridine-3'-phosphate
  modified_base 19: mod_base = OTHER; note = 2'-O-methylguanosine-3'-phosphate
  modified_base 20: mod_base = OTHER; note = 2'-O-methyladenosine-3'-phosphate
  modified_base 21: mod_base = OTHER; note = 2'-O-methyluridine-3'-phosphorothioate
  modified_base 22: mod_base = OTHER; note = 2'-O-methyladenosine-3'-phosphorothioate
  modified_base 23: mod_base = OTHER; note = 2'-O-methyladenosine-3'-phosphate
  misc_feature 1..4: note = RNA
  misc_feature 5: note = DNA
  misc_feature 6..23: note = RNA
taagcaaggctagggtttgataa

SEQ ID NO: 1188 - DNA, 23 bp, synthetic construct
  source 1..23: mol_type = other DNA
  modified_base 1: mod_base = OTHER; note = Vinyl-phosphonate-2'-O-methyluridine-3'-phosphate
  modified_base 2: mod_base = OTHER; note = 2'-fluoroguanosine-3'-phosphate
  modified_base 3: mod_base = OTHER; note = 2'-O-methylcytidine-3'-phosphate
  modified_base 4: mod_base = OTHER; note = 2'-O-methyluridine-3'-phosphate
  modified_base 6: mod_base = OTHER; note = 2'-O-methylcytidine-3'-phosphate
  modified_base 7: mod_base = OTHER; note = Thymidine-glycol nucleic acid (GNA) S-Isomer
  modified_base 8: mod_base = OTHER; note = 2'-O-methyluridine-3'-phosphate
  modified_base 9: mod_base = OTHER; note = 2'-O-methylcytidine-3'-phosphate
  modified_base 10: mod_base = OTHER; note = 2'-O-methyladenosine-3'-phosphate
  modified_base 11: mod_base = OTHER; note = 2'-O-methyladenosine-3'-phosphate
  modified_base 12: mod_base = OTHER; note = 2'-O-methyladenosine-3'-phosphate
  modified_base 13: mod_base = OTHER; note = 2'-O-methylguanosine-3'-phosphate
  modified_base 14: mod_base = OTHER; note = 2'-fluorocytidine-3'-phosphate
  modified_base 15: mod_base = OTHER; note = 2'-O-methyladenosine-3'-phosphate
  modified_base 16: mod_base = OTHER; note = 2'-fluoroadenosine-3'-phosphate
  modified_base 17: mod_base = OTHER; note = 2'-O-methylguanosine-3'-phosphate
  modified_base 18: mod_base = OTHER; note = 2'-O-methylcytidine-3'-phosphate
  modified_base 19: mod_base = OTHER; note = 2'-O-methyladenosine-3'-phosphate
  modified_base 20: mod_base = OTHER; note = 2'-O-methyladenosine-3'-phosphate
  modified_base 21: mod_base = OTHER; note = 2'-O-methyladenosine-3'-phosphorothioate
  modified_base 22: mod_base = OTHER; note = 2'-O-methylguanosine-3'-phosphorothioate
  modified_base 23: mod_base = OTHER; note = 2'-O-methyluridine-3'-phosphate
  misc_feature 1..4: note = RNA
  misc_feature 5: note = DNA
  misc_feature 6: note = RNA
  misc_feature 7: note = DNA
  misc_feature 8..23: note = RNA
tgctacttcaaagcaagcaaagt

SEQ ID NO: 1189 - DNA, 23 bp, synthetic construct
  source 1..23: mol_type = other DNA
  modified_base 1: mod_base = OTHER; note = Vinyl-phosphonate-2'-O-methyluridine-3'-phosphate
  modified_base 2: mod_base = OTHER; note = 2'-fluoroguanosine-3'-phosphate
  modified_base 3: mod_base = OTHER; note = 2'-O-methyladenosine-3'-phosphate
  modified_base 4: mod_base = OTHER; note = 2'-O-methylguanosine-3'-phosphate
  modified_base 6: mod_base = OTHER; note = 2'-O-methyluridine-3'-phosphate
  modified_base 7: mod_base = OTHER; note = Adenosine-glycol nucleic acid (GNA)
  modified_base 8: mod_base = OTHER; note = 2'-O-methylcytidine-3'-phosphate
  modified_base 9: mod_base = OTHER; note = 2'-O-methyluridine-3'-phosphate
  modified_base 10: mod_base = OTHER; note = 2'-O-methyluridine-3'-phosphate
  modified_base 11: mod_base = OTHER; note = 2'-O-methylcytidine-3'-phosphate
  modified_base 12: mod_base = OTHER; note = 2'-O-methyladenosine-3'-phosphate
  modified_base 13: mod_base = OTHER; note = 2'-O-methyladenosine-3'-phosphate
  modified_base 14: mod_base = OTHER; note = 2'-fluoroadenosine-3'-phosphate
  modified_base 15: mod_base = OTHER; note = 2'-O-methylguanosine-3'-phosphate
  modified_base 16: mod_base = OTHER; note = 2'-fluorocytidine-3'-phosphate
  modified_base 17: mod_base = OTHER; note = 2'-O-methyladenosine-3'-phosphate
  modified_base 18: mod_base = OTHER; note = 2'-O-methyladenosine-3'-phosphate
  modified_base 19: mod_base = OTHER; note = 2'-O-methylguanosine-3'-phosphate
  modified_base 20: mod_base = OTHER; note = 2'-O-methylcytidine-3'-phosphate
  modified_base 21: mod_base = OTHER; note = 2'-O-methyladenosine-3'-phosphorothioate
  modified_base 22: mod_base = OTHER; note = 2'-O-methyladenosine-3'-phosphorothioate
  modified_base 23: mod_base = OTHER; note = 2'-O-methyladenosine-3'-phosphate
  misc_feature 1..4: note = RNA
  misc_feature 5: note = DNA
  misc_feature 6..23: note = RNA
tgagctacttcaaagcaagcaaa

SEQ ID NO: 1190 - DNA, 23 bp, synthetic construct
  source 1..23: mol_type = other DNA
  modified_base 1: mod_base = OTHER; note = Vinyl-phosphonate-2'-O-methyluridine-3'-phosphate
  modified_base 2: mod_base = OTHER; note = 2'-fluoroadenosine-3'-phosphate
  modified_base 3: mod_base = OTHER; note = 2'-O-methylguanosine-3'-phosphate
  modified_base 4: mod_base = OTHER; note = 2'-O-methyladenosine-3'-phosphate
  modified_base 6: mod_base = OTHER; note = 2'-O-methylcytidine-3'-phosphate
  modified_base 7: mod_base = OTHER; note = Thymidine-glycol nucleic acid (GNA) S-Isomer
  modified_base 8: mod_base = OTHER; note = 2'-O-methyladenosine-3'-phosphate
  modified_base 9: mod_base = OTHER; note = 2'-O-methylcytidine-3'-phosphate
  modified_base 10: mod_base = OTHER; note = 2'-O-methyluridine-3'-phosphate
  modified_base 11: mod_base = OTHER; note = 2'-O-methyluridine-3'-phosphate
  modified_base 12: mod_base = OTHER; note = 2'-O-methylcytidine-3'-phosphate
  modified_base 13: mod_base = OTHER; note = 2'-O-methyladenosine-3'-phosphate
  modified_base 14: mod_base = OTHER; note = 2'-fluoroadenosine-3'-phosphate
  modified_base 15: mod_base = OTHER; note = 2'-O-methyladenosine-3'-phosphate
  modified_base 16: mod_base = OTHER; note = 2'-fluoroguanosine-3'-phosphate
  modified_base 17: mod_base = OTHER; note = 2'-O-methylcytidine-3'-phosphate
  modified_base 18: mod_base = OTHER; note = 2'-O-methyladenosine-3'-phosphate
  modified_base 19: mod_base = OTHER; note = 2'-O-methyladenosine-3'-phosphate
  modified_base 20: mod_base = OTHER; note = 2'-O-methylguanosine-3'-phosphate
  modified_base 21: mod_base = OTHER; note = 2'-O-methylcytidine-3'-phosphorothioate
  modified_base 22: mod_base = OTHER; note = 2'-O-methyladenosine-3'-phosphorothioate
  modified_base 23: mod_base = OTHER; note = 2'-O-methyladenosine-3'-phosphate
  misc_feature 1..4: note = RNA
  misc_feature 5: note = DNA
  misc_feature 6: note = RNA
  misc_feature 7: note = DNA
  misc_feature 8..23: note = RNA
tagagctacttcaaagcaagcaa

SEQ ID NO: 1191 - DNA, 23 bp, synthetic construct
  source 1..23: mol_type = other DNA
  modified_base 1: mod_base = OTHER; note = Vinyl-phosphonate-2'-O-methyluridine-3'-phosphate
  modified_base 3: mod_base = OTHER; note = 2'-O-methyluridine-3'-phosphate
  modified_base 4: mod_base = OTHER; note = 2'-O-methyluridine-3'-phosphate
  modified_base 6: mod_base = OTHER; note = 2'-O-methyladenosine-3'-phosphate
  modified_base 8: mod_base = OTHER; note = 2'-O-methyladenosine-3'-phosphate
  modified_base 9: mod_base = OTHER; note = 2'-O-methylcytidine-3'-phosphate
  modified_base 10: mod_base = OTHER; note = 2'-O-methyluridine-3'-phosphate
  modified_base 11: mod_base = OTHER; note = 2'-O-methyladenosine-3'-phosphate
  modified_base 13: mod_base = OTHER; note = 2'-O-methylguanosine-3'-phosphate
  modified_base 14: mod_base = OTHER; note = 2'-fluoroadenosine-3'-phosphate
  modified_base 15: mod_base = OTHER; note = 2'-O-methylguanosine-3'-phosphate
  modified_base 16: mod_base = OTHER; note = 2'-O-methyladenosine-3'-phosphate
  modified_base 17: mod_base = OTHER; note = 2'-O-methylguanosine-3'-phosphate
  modified_base 18: mod_base = OTHER; note = 2'-O-methyladenosine-3'-phosphate
  modified_base 19: mod_base = OTHER; note = 2'-O-methylcytidine-3'-phosphate
  modified_base 20: mod_base = OTHER; note = 2'-O-methyluridine-3'-phosphate
  modified_base 21: mod_base = OTHER; note = 2'-O-methyluridine-3'-phosphorothioate
  modified_base 22: mod_base = OTHER; note = 2'-O-methyladenosine-3'-phosphorothioate
  modified_base 23: mod_base = OTHER; note = 2'-O-methyladenosine-3'-phosphate
  misc_feature 1: note = RNA
  misc_feature 2: note = DNA
  misc_feature 3..4: note = RNA
  misc_feature 5: note = DNA
  misc_feature 6: note = RNA
  misc_feature 7: note = DNA
  misc_feature 8..11: note = RNA
  misc_feature 12: note = DNA
  misc_feature 13..23: note = RNA
tcttaacactacgagagacttaa

SEQ ID NO: 1192 - DNA, 23 bp, synthetic construct
  source 1..23: mol_type = other DNA
  modified_base 1: mod_base = OTHER; note = Vinyl-phosphonate-2'-O-methyluridine-3'-phosphate
  modified_base 2: mod_base = OTHER; note = 2'-fluorouridine-3'-phosphate
  modified_base 3: mod_base = OTHER; note = 2'-O-methyladenosine-3'-phosphate
  modified_base 4: mod_base = OTHER; note = 2'-O-methyladenosine-3'-phosphate
  modified_base 6: mod_base = OTHER; note = 2'-O-methyluridine-3'-phosphate
  modified_base 7: mod_base = OTHER; note = Thymidine-glycol nucleic acid (GNA) S-Isomer
  modified_base 8: mod_base = OTHER; note = 2'-O-methyladenosine-3'-phosphate
  modified_base 9: mod_base = OTHER; note = 2'-O-methyladenosine-3'-phosphate
  modified_base 10: mod_base = OTHER; note = 2'-O-methylcytidine-3'-phosphate
  modified_base 11: mod_base = OTHER; note = 2'-O-methyladenosine-3'-phosphate
  modified_base 12: mod_base = OTHER; note = 2'-O-methylcytidine-3'-phosphate
  modified_base 13: mod_base = OTHER; note = 2'-O-methyluridine-3'-phosphate
  modified_base 14: mod_base = OTHER; note = 2'-fluoroadenosine-3'-phosphate
  modified_base 15: mod_base = OTHER; note = 2'-O-methylcytidine-3'-phosphate
  modified_base 16: mod_base = OTHER; note = 2'-fluoroguanosine-3'-phosphate
  modified_base 17: mod_base = OTHER; note = 2'-O-methyladenosine-3'-phosphate
  modified_base 18: mod_base = OTHER; note = 2'-O-methylguanosine-3'-phosphate
  modified_base 19: mod_base = OTHER; note = 2'-O-methyladenosine-3'-phosphate
  modified_base 20: mod_base = OTHER; note = 2'-O-methylguanosine-3'-phosphate
  modified_base 21: mod_base = OTHER; note = 2'-O-methyladenosine-3'-phosphorothioate
  modified_base 22: mod_base = OTHER; note = 2'-O-methylcytidine-3'-phosphorothioate
  modified_base 23: mod_base = OTHER; note = 2'-O-methyluridine-3'-phosphate
  misc_feature 1..4: note = RNA
  misc_feature 5: note = DNA
  misc_feature 6: note = RNA
  misc_feature 7: note = DNA
  misc_feature 8..23: note = RNA
ttaacttaacactacgagagact

SEQ ID NO: 1193 - DNA, 23 bp, synthetic construct
  source 1..23: mol_type = other DNA
  modified_base 1: mod_base = OTHER; note = Vinyl-phosphonate-2'-O-methyluridine-3'-phosphate
  modified_base 2: mod_base = OTHER; note = 2'-fluoroadenosine-3'-phosphate
  modified_base 3: mod_base = OTHER; note = 2'-O-methyluridine-3'-phosphate
  modified_base 4: mod_base = OTHER; note = 2'-O-methyladenosine-3'-phosphate
  modified_base 6: mod_base = OTHER; note = 2'-O-methylcytidine-3'-phosphate
  modified_base 7: mod_base = OTHER; note = Thymidine-glycol nucleic acid (GNA) S-Isomer
  modified_base 8: mod_base = OTHER; note = 2'-O-methyluridine-3'-phosphate
  modified_base 9: mod_base = OTHER; note = 2'-O-methyladenosine-3'-phosphate
  modified_base 10: mod_base = OTHER; note = 2'-O-methyladenosine-3'-phosphate
  modified_base 11: mod_base = OTHER; note = 2'-O-methylcytidine-3'-phosphate
  modified_base 12: mod_base = OTHER; note = 2'-O-methyladenosine-3'-phosphate
  modified_base 13: mod_base = OTHER; note = 2'-O-methylcytidine-3'-phosphate
  modified_base 14: mod_base = OTHER; note = 2'-fluorouridine-3'-phosphate
  modified_base 15: mod_base = OTHER; note = 2'-O-methyladenosine-3'-phosphate
  modified_base 16: mod_base = OTHER; note = 2'-fluorocytidine-3'-phosphate
  modified_base 17: mod_base = OTHER; note = 2'-O-methylguanosine-3'-phosphate
  modified_base 18: mod_base = OTHER; note = 2'-O-methyladenosine-3'-phosphate
  modified_base 19: mod_base = OTHER; note = 2'-O-methylguanosine-3'-phosphate
  modified_base 20: mod_base = OTHER; note = 2'-O-methyladenosine-3'-phosphate
  modified_base 21: mod_base = OTHER; note = 2'-O-methylguanosine-3'-phosphorothioate
  modified_base 22: mod_base = OTHER; note = 2'-O-methyladenosine-3'-phosphorothioate
  modified_base 23: mod_base = OTHER; note = 2'-O-methylcytidine-3'-phosphate
  misc_feature 1..4: note = RNA
  misc_feature 5: note = DNA
  misc_feature 6: note = RNA
  misc_feature 7: note = DNA
  misc_feature 8..23: note = RNA
tataacttaacactacgagagac

SEQ ID NO: 1194 - DNA, 23 bp, synthetic construct
  source 1..23: mol_type = other DNA
  modified_base 1: mod_base = OTHER; note = Vinyl-phosphonate-2'-O-methyluridine-3'-phosphate
  modified_base 3: mod_base = OTHER; note = 2'-O-methyluridine-3'-phosphate
  modified_base 4: mod_base = OTHER; note = 2'-O-methyladenosine-3'-phosphate
  modified_base 6: mod_base = OTHER; note = 2'-O-methylcytidine-3'-phosphate
  modified_base 8: mod_base = OTHER; note = 2'-O-methyluridine-3'-phosphate
  modified_base 9: mod_base = OTHER; note = 2'-O-methyladenosine-3'-phosphate
  modified_base 10: mod_base = OTHER; note = 2'-O-methyladenosine-3'-phosphate
  modified_base 11: mod_base = OTHER; note = 2'-O-methylcytidine-3'-phosphate
  modified_base 13: mod_base = OTHER; note = 2'-O-methylcytidine-3'-phosphate
  modified_base 14: mod_base = OTHER; note = 2'-fluorouridine-3'-phosphate
  modified_base 15: mod_base = OTHER; note = 2'-O-methyladenosine-3'-phosphate
  modified_base 16: mod_base = OTHER; note = 2'-O-methylcytidine-3'-phosphate
  modified_base 17: mod_base = OTHER; note = 2'-O-methylguanosine-3'-phosphate
  modified_base 18: mod_base = OTHER; note = 2'-O-methyladenosine-3'-phosphate
  modified_base 19: mod_base = OTHER; note = 2'-O-methylguanosine-3'-phosphate
  modified_base 20: mod_base = OTHER; note = 2'-O-methyladenosine-3'-phosphate
  modified_base 21: mod_base = OTHER; note = 2'-O-methylguanosine-3'-phosphorothioate
  modified_base 22: mod_base = OTHER; note = 2'-O-methyladenosine-3'-phosphorothioate
  modified_base 23: mod_base = OTHER; note = 2'-O-methylcytidine-3'-phosphate
  misc_feature 1: note = RNA
  misc_feature 2: note = DNA
  misc_feature 3..4: note = RNA
  misc_feature 5: note = DNA
  misc_feature 6: note = RNA
  misc_feature 7: note = DNA
  misc_feature 8..11: note = RNA
  misc_feature 12: note = DNA
  misc_feature 13..23: note = RNA
tataacttaacactacgagagac

SEQ ID NO: 1195 - DNA, 23 bp, synthetic construct
  source 1..23: mol_type = other DNA
  modified_base 1: mod_base = OTHER; note = Vinyl-phosphonate-2'-O-methyluridine-3'-phosphate
  modified_base 3: mod_base = OTHER; note = 2'-O-methyluridine-3'-phosphate
  modified_base 4: mod_base = OTHER; note = 2'-O-methyladenosine-3'-phosphate
  modified_base 6: mod_base = OTHER; note = 2'-O-methyladenosine-3'-phosphate
  modified_base 8: mod_base = OTHER; note = 2'-O-methylcytidine-3'-phosphate
  modified_base 9: mod_base = OTHER; note = 2'-O-methyluridine-3'-phosphate
  modified_base 10: mod_base = OTHER; note = 2'-O-methyluridine-3'-phosphate
  modified_base 11: mod_base = OTHER; note = 2'-O-methyladenosine-3'-phosphate
  modified_base 13: mod_base = OTHER; note = 2'-O-methylcytidine-3'-phosphate
  modified_base 14: mod_base = OTHER; note = 2'-fluoroadenosine-3'-phosphate
  modified_base 15: mod_base = OTHER; note = 2'-O-methylcytidine-3'-phosphate
  modified_base 16: mod_base = OTHER; note = 2'-O-methyluridine-3'-phosphate
  modified_base 17: mod_base = OTHER; note = 2'-O-methyladenosine-3'-phosphate
  modified_base 18: mod_base = OTHER; note = 2'-O-methylcytidine-3'-phosphate
  modified_base 19: mod_base = OTHER; note = 2'-O-methylguanosine-3'-phosphate
  modified_base 20: mod_base = OTHER; note = 2'-O-methyladenosine-3'-phosphate
  modified_base 21: mod_base = OTHER; note = 2'-O-methylguanosine-3'-phosphorothioate
  modified_base 22: mod_base = OTHER; note = 2'-O-methyladenosine-3'-phosphorothioate
  modified_base 23: mod_base = OTHER; note = 2'-O-methylguanosine-3'-phosphate
  misc_feature 1: note = RNA
  misc_feature 2: note = DNA
  misc_feature 3..4: note = RNA
  misc_feature 5: note = DNA
  misc_feature 6: note = RNA
  misc_feature 7: note = DNA
  misc_feature 8..11: note = RNA
  misc_feature 12: note = DNA
  misc_feature 13..23: note = RNA
tctataacttaacactacgagag

SEQ ID NO: 1196 - DNA, 23 bp, synthetic construct
  source 1..23: mol_type = other DNA
  modified_base 1: mod_base = OTHER; note = Vinyl-phosphonate-2'-O-methyluridine-3'-phosphate
  modified_base 3: mod_base = OTHER; note = 2'-O-methyladenosine-3'-phosphate
  modified_base 4: mod_base = OTHER; note = 2'-O-methylcytidine-3'-phosphate
  modified_base 6: mod_base = OTHER; note = 2'-O-methyladenosine-3'-phosphate
  modified_base 8: mod_base = OTHER; note = 2'-O-methyladenosine-3'-phosphate
  modified_base 9: mod_base = OTHER; note = 2'-O-methyladenosine-3'-phosphate
  modified_base 10: mod_base = OTHER; note = 2'-O-methylcytidine-3'-phosphate
  modified_base 11: mod_base = OTHER; note = 2'-O-methyluridine-3'-phosphate
  modified_base 13: mod_base = OTHER; note = 2'-O-methyladenosine-3'-phosphate
  modified_base 14: mod_base = OTHER; note = 2'-fluoroadenosine-3'-phosphate
  modified_base 15: mod_base = OTHER; note = 2'-O-methylcytidine-3'-phosphate
  modified_base 16: mod_base = OTHER; note = 2'-O-methyladenosine-3'-phosphate
  modified_base 17: mod_base = OTHER; note = 2'-O-methylcytidine-3'-phosphate
  modified_base 18: mod_base = OTHER; note = 2'-O-methyluridine-3'-phosphate
  modified_base 19: mod_base = OTHER; note = 2'-O-methyladenosine-3'-phosphate
  modified_base 20: mod_base = OTHER; note = 2'-O-methylcytidine-3'-phosphate
  modified_base 21: mod_base = OTHER; note = 2'-O-methylguanosine-3'-phosphorothioate
  modified_base 22: mod_base = OTHER; note = 2'-O-methyladenosine-3'-phosphorothioate
  modified_base 23: mod_base = OTHER; note = 2'-O-methylguanosine-3'-phosphate
  misc_feature 1: note = RNA
  misc_feature 2: note = DNA
  misc_feature 3..4: note = RNA
  misc_feature 5: note = DNA
  misc_feature 6: note = RNA
  misc_feature 7: note = DNA
  misc_feature 8..11: note = RNA
  misc_feature 12: note = DNA
  misc_feature 13..23: note = RNA
tcactataacttaacactacgag

SEQ ID NO: 1197 - DNA, 23 bp, synthetic construct
  source 1..23: mol_type = other DNA
  modified_base 1: mod_base = OTHER; note = Vinyl-phosphonate-2'-O-methyluridine-3'-phosphate
  modified_base 2: mod_base = OTHER; note = 2'-fluorouridine-3'-phosphate
  modified_base 3: mod_base = OTHER; note = 2'-O-methyluridine-3'-phosphate
  modified_base 4: mod_base = OTHER; note = 2'-O-methylcytidine-3'-phosphate
  modified_base 6: mod_base = OTHER; note = 2'-O-methylcytidine-3'-phosphate
  modified_base 7: mod_base = OTHER; note = Thymidine-glycol nucleic acid (GNA) S-Isomer
  modified_base 8: mod_base = OTHER; note = 2'-O-methyladenosine-3'-phosphate
  modified_base 9: mod_base = OTHER; note = 2'-O-methyluridine-3'-phosphate
  modified_base 10: mod_base = OTHER; note = 2'-O-methyladenosine-3'-phosphate
  modified_base 11: mod_base = OTHER; note = 2'-O-methyladenosine-3'-phosphate
  modified_base 12: mod_base = OTHER; note = 2'-O-methylcytidine-3'-phosphate
  modified_base 13: mod_base = OTHER; note = 2'-O-methyluridine-3'-phosphate
  modified_base 14: mod_base = OTHER; note = 2'-fluorouridine-3'-phosphate
  modified_base 15: mod_base = OTHER; note = 2'-O-methyladenosine-3'-phosphate
  modified_base 16: mod_base = OTHER; note = 2'-fluoroadenosine-3'-phosphate
  modified_base 17: mod_base = OTHER; note = 2'-O-methylcytidine-3'-phosphate
  modified_base 18: mod_base = OTHER; note = 2'-O-methyladenosine-3'-phosphate
  modified_base 19: mod_base = OTHER; note = 2'-O-methylcytidine-3'-phosphate
  modified_base 20: mod_base = OTHER; note = 2'-O-methyluridine-3'-phosphate
  modified_base 21: mod_base = OTHER; note = 2'-O-methyladenosine-3'-phosphorothioate
  modified_base 22: mod_base = OTHER; note = 2'-O-methylcytidine-3'-phosphorothioate
  modified_base 23: mod_base = OTHER; note = 2'-O-methylguanosine-3'-phosphate
  misc_feature 1..4: note = RNA
  misc_feature 5: note = DNA
  misc_feature 6: note = RNA
  misc_feature 7: note = DNA
  misc_feature 8..23: note = RNA
tttcactataacttaacactacg

SEQ ID NO: 1198 - DNA, 23 bp, synthetic construct
  source 1..23: mol_type = other DNA
  modified_base 1: mod_base = OTHER; note = Vinyl-phosphonate-2'-O-methyluridine-3'-phosphate
  modified_base 2: mod_base = OTHER; note = 2'-fluoroadenosine-3'-phosphate
  modified_base 3: mod_base = OTHER; note = 2'-O-methyluridine-3'-phosphate
  modified_base 4: mod_base = OTHER; note = 2'-O-methyluridine-3'-phosphate
  modified_base 6: mod_base = OTHER; note = 2'-O-methylcytidine-3'-phosphate
  modified_base 7: mod_base = OTHER; note = Thymidine-glycol nucleic acid (GNA) S-Isomer
  modified_base 8: mod_base = OTHER; note = 2'-O-methylguanosine-3'-phosphate
  modified_base 9: mod_base = OTHER; note = 2'-O-methyluridine-3'-phosphate
  modified_base 10: mod_base = OTHER; note = 2'-O-methyladenosine-3'-phosphate
  modified_base 11: mod_base = OTHER; note = 2'-O-methylguanosine-3'-phosphate
  modified_base 12: mod_base = OTHER; note = 2'-O-methylcytidine-3'-phosphate
  modified_base 13: mod_base = OTHER; note = 2'-O-methyladenosine-3'-phosphate
  modified_base 14: mod_base = OTHER; note = 2'-fluoroguanosine-3'-phosphate
  modified_base 15: mod_base = OTHER; note = 2'-O-methyluridine-3'-phosphate
  modified_base 16: mod_base = OTHER; note = 2'-fluoroadenosine-3'-phosphate
  modified_base 17: mod_base = OTHER; note = 2'-O-methyluridine-3'-phosphate
  modified_base 18: mod_base = OTHER; note = 2'-O-methyluridine-3'-phosphate
  modified_base 19: mod_base = OTHER; note = 2'-O-methylcytidine-3'-phosphate
  modified_base 20: mod_base = OTHER; note = 2'-O-methyladenosine-3'-phosphate
  modified_base 21: mod_base = OTHER; note = 2'-O-methylcytidine-3'-phosphorothioate
  modified_base 22: mod_base = OTHER; note = 2'-O-methyluridine-3'-phosphorothioate
  modified_base 23: mod_base = OTHER; note = 2'-O-methyladenosine-3'-phosphate
  misc_feature 1..4: note = RNA
  misc_feature 5: note = DNA
  misc_feature 6: note = RNA
  misc_feature 7: note = DNA
  misc_feature 8..23: note = RNA
tattgctgtagcagtattcacta

SEQ ID NO: 1199 - DNA, 23 bp, synthetic construct
  source 1..23: mol_type = other DNA
  modified_base 1: mod_base = OTHER; note = Vinyl-phosphonate-2'-O-methyluridine-3'-phosphate
  modified_base 3: mod_base = OTHER; note = 2'-O-methyluridine-3'-phosphate
  modified_base 4: mod_base = OTHER; note = 2'-O-methyluridine-3'-phosphate
  modified_base 6: mod_base = OTHER; note = 2'-O-methylguanosine-3'-phosphate
  modified_base 8: mod_base = OTHER; note = 2'-O-methyladenosine-3'-phosphate
  modified_base 9: mod_base = OTHER; note = 2'-O-methyladenosine-3'-phosphate
  modified_base 10: mod_base = OTHER; note = 2'-O-methyluridine-3'-phosphate
  modified_base 11: mod_base = OTHER; note = 2'-O-methyluridine-3'-phosphate
  modified_base 13: mod_base = OTHER; note = 2'-O-methylcytidine-3'-phosphate
  modified_base 14: mod_base = OTHER; note = 2'-fluorouridine-3'-phosphate
  modified_base 15: mod_base = OTHER; note = 2'-O-methylguanosine-3'-phosphate
  modified_base 16: mod_base = OTHER; note = 2'-O-methyluridine-3'-phosphate
  modified_base 17: mod_base = OTHER; note = 2'-O-methyladenosine-3'-phosphate
  modified_base 18: mod_base = OTHER; note = 2'-O-methylguanosine-3'-phosphate
  modified_base 19: mod_base = OTHER; note = 2'-O-methylcytidine-3'-phosphate
  modified_base 20: mod_base = OTHER; note = 2'-O-methyladenosine-3'-phosphate
  modified_base 21: mod_base = OTHER; note = 2'-O-methylguanosine-3'-phosphorothioate
  modified_base 22: mod_base = OTHER; note = 2'-O-methyluridine-3'-phosphorothioate
  modified_base 23: mod_base = OTHER; note = 2'-O-methyladenosine-3'-phosphate
  misc_feature 1: note = RNA
  misc_feature 2: note = DNA
  misc_feature 3..4: note = RNA
  misc_feature 5: note = DNA
  misc_feature 6: note = RNA
  misc_feature 7: note = DNA
  misc_feature 8..11: note = RNA
  misc_feature 12: note = DNA
  misc_feature 13..23: note = RNA
tattagaaattgctgtagcagta

SEQ ID NO: 1200 - DNA, 23 bp, synthetic construct
  source 1..23: mol_type = other DNA
  modified_base 1: mod_base = OTHER; note = Vinyl-phosphonate-2'-O-methyluridine-3'-phosphate
  modified_base 2: mod_base = OTHER; note = 2'-fluorouridine-3'-phosphate
  modified_base 3: mod_base = OTHER; note = 2'-O-methylcytidine-3'-phosphate
  modified_base 4: mod_base = OTHER; note = 2'-O-methyluridine-3'-phosphate
  modified_base 6: mod_base = OTHER; note = 2'-O-methylcytidine-3'-phosphate
  modified_base 7: mod_base = OTHER; note = Adenosine-glycol nucleic acid (GNA)
  modified_base 8: mod_base = OTHER; note = 2'-O-methylcytidine-3'-phosphate
  modified_base 9: mod_base = OTHER; note = 2'-O-methylcytidine-3'-phosphate
  modified_base 10: mod_base = OTHER; note = 2'-O-methyladenosine-3'-phosphate
  modified_base 11: mod_base = OTHER; note = 2'-O-methyluridine-3'-phosphate
  modified_base 12: mod_base = OTHER; note = 2'-O-methyluridine-3'-phosphate
  modified_base 13: mod_base = OTHER; note = 2'-O-methyladenosine-3'-phosphate
  modified_base 14: mod_base = OTHER; note = 2'-fluorocytidine-3'-phosphate
  modified_base 15: mod_base = OTHER; note = 2'-O-methyluridine-3'-phosphate
  modified_base 16: mod_base = OTHER; note = 2'-fluorocytidine-3'-phosphate
  modified_base 17: mod_base = OTHER; note = 2'-O-methyladenosine-3'-phosphate
  modified_base 18: mod_base = OTHER; note = 2'-O-methyladenosine-3'-phosphate
  modified_base 19: mod_base = OTHER; note = 2'-O-methyluridine-3'-phosphate
  modified_base 20: mod_base = OTHER; note = 2'-O-methyluridine-3'-phosphate
  modified_base 21: mod_base = OTHER; note = 2'-O-methylcytidine-3'-phosphorothioate
  modified_base 22: mod_base = OTHER; note = 2'-O-methyluridine-3'-phosphorothioate
  modified_base 23: mod_base = OTHER; note = 2'-O-methyluridine-3'-phosphate
  misc_feature 1..4: note = RNA
  misc_feature 5: note = DNA
  misc_feature 6..23: note = RNA
ttctacaccattactcaattctt

SEQ ID NO: 1201 - DNA, 23 bp, synthetic construct
  source 1..23: mol_type = other DNA
  modified_base 1: mod_base = OTHER; note = Vinyl-phosphonate-2'-O-methyluridine-3'-phosphate
  modified_base 2: mod_base = OTHER; note = 2'-fluorouridine-3'-phosphate
  modified_base 3: mod_base = OTHER; note = 2'-O-methylguanosine-3'-phosphate
  modified_base 4: mod_base = OTHER; note = 2'-O-methyluridine-3'-phosphate
  modified_base 6: mod_base = OTHER; note = 2'-O-methylcytidine-3'-phosphate
  modified_base 7: mod_base = OTHER; note = Thymidine-glycol nucleic acid (GNA) S-Isomer
  modified_base 8: mod_base = OTHER; note = 2'-O-methyladenosine-3'-phosphate
  modified_base 9: mod_base = OTHER; note = 2'-O-methylcytidine-3'-phosphate
  modified_base 10: mod_base = OTHER; note = 2'-O-methyladenosine-3'-phosphate
  modified_base 11: mod_base = OTHER; note = 2'-O-methylcytidine-3'-phosphate
  modified_base 12: mod_base = OTHER; note = 2'-O-methylcytidine-3'-phosphate
  modified_base 13: mod_base = OTHER; note = 2'-O-methyladenosine-3'-phosphate
  modified_base 14: mod_base = OTHER; note = 2'-fluorouridine-3'-phosphate
  modified_base 15: mod_base = OTHER; note = 2'-O-methyluridine-3'-phosphate
  modified_base 16: mod_base = OTHER; note = 2'-fluoroadenosine-3'-phosphate
  modified_base 17: mod_base = OTHER; note = 2'-O-methylcytidine-3'-phosphate
  modified_base 18: mod_base = OTHER; note = 2'-O-methyluridine-3'-phosphate
  modified_base 19: mod_base = OTHER; note = 2'-O-methylcytidine-3'-phosphate
  modified_base 20: mod_base = OTHER; note = 2'-O-methyladenosine-3'-phosphate
  modified_base 21: mod_base = OTHER; note = 2'-O-methyladenosine-3'-phosphorothioate
  modified_base 22: mod_base = OTHER; note = 2'-O-methyluridine-3'-phosphorothioate
  modified_base 23: mod_base = OTHER; note = 2'-O-methyluridine-3'-phosphate
  misc_feature 1..4: note = RNA
  misc_feature 5: note = DNA
  misc_feature 6: note = RNA
  misc_feature 7: note = DNA
  misc_feature 8..23: note = RNA
ttgttctacaccattactcaatt

SEQ ID NO: 1202 - DNA, 23 bp, synthetic construct
  source 1..23: mol_type = other DNA
  modified_base 1: mod_base = OTHER; note = Vinyl-phosphonate-2'-O-methyluridine-3'-phosphate
  modified_base 2: mod_base = OTHER; note = 2'-fluoroadenosine-3'-phosphate
  modified_base 3: mod_base = OTHER; note = 2'-O-methylguanosine-3'-phosphate
  modified_base 4: mod_base = OTHER; note = 2'-O-methyluridine-3'-phosphate
  modified_base 6: mod_base = OTHER; note = 2'-O-methyluridine-3'-phosphate
  modified_base 7: mod_base = OTHER; note = Thymidine-glycol nucleic acid (GNA) S-Isomer
  modified_base 8: mod_base = OTHER; note = 2'-O-methylcytidine-3'-phosphate
  modified_base 9: mod_base = OTHER; note = 2'-O-methyluridine-3'-phosphate
  modified_base 10: mod_base = OTHER; note = 2'-O-methyladenosine-3'-phosphate
  modified_base 11: mod_base = OTHER; note = 2'-O-methylcytidine-3'-phosphate
  modified_base 12: mod_base = OTHER; note = 2'-O-methyladenosine-3'-phosphate
  modified_base 13: mod_base = OTHER; note = 2'-O-methylcytidine-3'-phosphate
  modified_base 14: mod_base = OTHER; note = 2'-fluorocytidine-3'-phosphate
  modified_base 15: mod_base = OTHER; note = 2'-O-methyladenosine-3'-phosphate
  modified_base 16: mod_base = OTHER; note = 2'-fluorouridine-3'-phosphate
  modified_base 17: mod_base = OTHER; note = 2'-O-methyluridine-3'-phosphate
  modified_base 18: mod_base = OTHER; note = 2'-O-methyladenosine-3'-phosphate
  modified_base 19: mod_base = OTHER; note = 2'-O-methylcytidine-3'-phosphate
  modified_base 20: mod_base = OTHER; note = 2'-O-methyluridine-3'-phosphate
  modified_base 21: mod_base = OTHER; note = 2'-O-methylcytidine-3'-phosphorothioate
  modified_base 22: mod_base = OTHER; note = 2'-O-methyladenosine-3'-phosphorothioate
  modified_base 23: mod_base = OTHER; note = 2'-O-methyladenosine-3'-phosphate
  misc_feature 1..4: note = RNA
  misc_feature 5: note = DNA
  misc_feature 6: note = RNA
  misc_feature 7: note = DNA
  misc_feature 8..23: note = RNA
tagtgttctacaccattactcaa

SEQ ID NO: 1203 - DNA, 23 bp, synthetic construct
  source 1..23: mol_type = other DNA
  modified_base 1: mod_base = OTHER; note = Vinyl-phosphonate-2'-O-methyluridine-3'-phosphate
  modified_base 2: mod_base = OTHER; note = 2'-fluorouridine-3'-phosphate
  modified_base 3: mod_base = OTHER; note = 2'-O-methyladenosine-3'-phosphate
  modified_base 4: mod_base = OTHER; note = 2'-O-methylguanosine-3'-phosphate
  modified_base 6: mod_base = OTHER; note = 2'-O-methylguanosine-3'-phosphate
  modified_base 7: mod_base = OTHER; note = Thymidine-glycol nucleic acid (GNA) S-Isomer
  modified_base 8: mod_base = OTHER; note = 2'-O-methyluridine-3'-phosphate
  modified_base 9: mod_base = OTHER; note = 2'-O-methylcytidine-3'-phosphate
  modified_base 10: mod_base = OTHER; note = 2'-O-methyluridine-3'-phosphate
  modified_base 11: mod_base = OTHER; note = 2'-O-methyladenosine-3'-phosphate
  modified_base 12: mod_base = OTHER; note = 2'-O-methylcytidine-3'-phosphate
  modified_base 13: mod_base = OTHER; note = 2'-O-methyladenosine-3'-phosphate
  modified_base 14: mod_base = OTHER; note = 2'-fluorocytidine-3'-phosphate
  modified_base 15: mod_base = OTHER; note = 2'-O-methylcytidine-3'-phosphate
  modified_base 16: mod_base = OTHER; note = 2'-fluoroadenosine-3'-phosphate
  modified_base 17: mod_base = OTHER; note = 2'-O-methyluridine-3'-phosphate
  modified_base 18: mod_base = OTHER; note = 2'-O-methyluridine-3'-phosphate
  modified_base 19: mod_base = OTHER; note = 2'-O-methyladenosine-3'-phosphate
  modified_base 20: mod_base = OTHER; note = 2'-O-methylcytidine-3'-phosphate
  modified_base 21: mod_base = OTHER; note = 2'-O-methyluridine-3'-phosphorothioate
  modified_base 22: mod_base = OTHER; note = 2'-O-methylcytidine-3'-phosphorothioate
  modified_base 23: mod_base = OTHER; note = 2'-O-methyladenosine-3'-phosphate
  misc_feature 1..4: note = RNA
  misc_feature 5: note = DNA
  misc_feature 6: note = RNA
  misc_feature 7: note = DNA
  misc_feature 8..23: note = RNA
ttagtgttctacaccattactca

SEQ ID NO: 1204 - DNA, 23 bp, synthetic construct
  source 1..23: mol_type = other DNA
  modified_base 1: mod_base = OTHER; note = Vinyl-phosphonate-2'-O-methyluridine-3'-phosphate
  modified_base 2: mod_base = OTHER; note = 2'-fluoroadenosine-3'-phosphate
  modified_base 3: mod_base = OTHER; note = 2'-O-methyluridine-3'-phosphate
  modified_base 4: mod_base = OTHER; note = 2'-O-methyluridine-3'-phosphate
  modified_base 6: mod_base = OTHER; note = 2'-O-methylguanosine-3'-phosphate
  modified_base 7: mod_base = OTHER; note = Thymidine-glycol nucleic acid (GNA) S-Isomer
  modified_base 8: mod_base = OTHER; note = 2'-O-methylguanosine-3'-phosphate
  modified_base 9: mod_base = OTHER; note = 2'-O-methyluridine-3'-phosphate
  modified_base 10: mod_base = OTHER; note = 2'-O-methyluridine-3'-phosphate
  modified_base 11: mod_base = OTHER; note = 2'-O-methylcytidine-3'-phosphate
  modified_base 12: mod_base = OTHER; note = 2'-O-methyluridine-3'-phosphate
  modified_base 13: mod_base = OTHER; note = 2'-O-methyladenosine-3'-phosphate
  modified_base 14: mod_base = OTHER; note = 2'-fluorocytidine-3'-phosphate
  modified_base 15: mod_base = OTHER; note = 2'-O-methyladenosine-3'-phosphate
  modified_base 16: mod_base = OTHER; note = 2'-fluorocytidine-3'-phosphate
  modified_base 17: mod_base = OTHER; note = 2'-O-methylcytidine-3'-phosphate
  modified_base 18: mod_base = OTHER; note = 2'-O-methyladenosine-3'-phosphate
  modified_base 19: mod_base = OTHER; note = 2'-O-methyluridine-3'-phosphate
  modified_base 20: mod_base = OTHER; note = 2'-O-methyluridine-3'-phosphate
  modified_base 21: mod_base = OTHER; note = 2'-O-methyladenosine-3'-phosphorothioate
  modified_base 22: mod_base = OTHER; note = 2'-O-methylcytidine-3'-phosphorothioate
  modified_base 23: mod_base = OTHER; note = 2'-O-methyluridine-3'-phosphate
  misc_feature 1..4: note = RNA
  misc_feature 5: note = DNA
  misc_feature 6: note = RNA
  misc_feature 7: note = DNA
  misc_feature 8..23: note = RNA
tattagtgttctacaccattact

SEQ ID NO: 1205 - DNA, 23 bp, synthetic construct
  source 1..23: mol_type = other DNA
  modified_base 1: mod_base = OTHER; note = Vinyl-phosphonate-2'-O-methyluridine-3'-phosphate
  modified_base 3: mod_base = OTHER; note = 2'-O-methyladenosine-3'-phosphate
  modified_base 4: mod_base = OTHER; note = 2'-O-methyladenosine-3'-phosphate
  modified_base 6: mod_base = OTHER; note = 2'-O-methyluridine-3'-phosphate
  modified_base 8: mod_base = OTHER; note = 2'-O-methylguanosine-3'-phosphate
  modified_base 9: mod_base = OTHER; note = 2'-O-methyluridine-3'-phosphate
  modified_base 10: mod_base = OTHER; note = 2'-O-methylguanosine-3'-phosphate
  modified_base 11: mod_base = OTHER; note = 2'-O-methyluridine-3'-phosphate
  modified_base 13: mod_base = OTHER; note = 2'-O-methylcytidine-3'-phosphate
  modified_base 14: mod_base = OTHER; note = 2'-fluorouridine-3'-phosphate
  modified_base 15: mod_base = OTHER; note = 2'-O-methyladenosine-3'-phosphate
  modified_base 16: mod_base = OTHER; note = 2'-O-methylcytidine-3'-phosphate
  modified_base 17: mod_base = OTHER; note = 2'-O-methyladenosine-3'-phosphate
  modified_base 18: mod_base = OTHER; note = 2'-O-methylcytidine-3'-phosphate
  modified_base 19: mod_base = OTHER; note = 2'-O-methylcytidine-3'-phosphate
  modified_base 20: mod_base = OTHER; note = 2'-O-methyladenosine-3'-phosphate
  modified_base 21: mod_base = OTHER; note = 2'-O-methyluridine-3'-phosphorothioate
  modified_base 22: mod_base = OTHER; note = 2'-O-methyluridine-3'-phosphorothioate
  modified_base 23: mod_base = OTHER; note = 2'-O-methyladenosine-3'-phosphate
  misc_feature 1: note = RNA
  misc_feature 2: note = DNA
  misc_feature 3..4: note = RNA
  misc_feature 5: note = DNA
  misc_feature 6: note = RNA
  misc_feature 7: note = DNA
  misc_feature 8..11: note = RNA
  misc_feature 12: note = DNA
  misc_feature 13..23: note = RNA
tgaattagtgttctacaccatta

SEQ ID NO: 1206 - DNA, 23 bp, synthetic construct
  source 1..23: mol_type = other DNA
  modified_base 1: mod_base = OTHER; note = Vinyl-phosphonate-2'-O-methyluridine-3'-phosphate
  modified_base 3: mod_base = OTHER; note = 2'-O-methylguanosine-3'-phosphate
  modified_base 4: mod_base = OTHER; note = 2'-O-methyladenosine-3'-phosphate
  modified_base 6: mod_base = OTHER; note = 2'-O-methyluridine-3'-phosphate
  modified_base 8: mod_base = OTHER; note = 2'-O-methyladenosine-3'-phosphate
  modified_base 9: mod_base = OTHER; note = 2'-O-methylguanosine-3'-phosphate
  modified_base 10: mod_base = OTHER; note = 2'-O-methyluridine-3'-phosphate
  modified_base 11: mod_base = OTHER; note = 2'-O-methylguanosine-3'-phosphate
  modified_base 13: mod_base = OTHER; note = 2'-O-methyluridine-3'-phosphate
  modified_base 14: mod_base = OTHER; note = 2'-fluorocytidine-3'-phosphate
  modified_base 15: mod_base = OTHER; note = 2'-O-methyluridine-3'-phosphate
  modified_base 16: mod_base = OTHER; note = 2'-O-methyladenosine-3'-phosphate
  modified_base 17: mod_base = OTHER; note = 2'-O-methylcytidine-3'-phosphate
  modified_base 18: mod_base = OTHER; note = 2'-O-methyladenosine-3'-phosphate
  modified_base 19: mod_base = OTHER; note = 2'-O-methylcytidine-3'-phosphate
  modified_base 20: mod_base = OTHER; note = 2'-O-methylcytidine-3'-phosphate
  modified_base 21: mod_base = OTHER; note = 2'-O-methyladenosine-3'-phosphorothioate
  modified_base 22: mod_base = OTHER; note = 2'-O-methyluridine-3'-phosphorothioate
  modified_base 23: mod_base = OTHER; note = 2'-O-methyluridine-3'-phosphate
  misc_feature 1: note = RNA
  misc_feature 2: note = DNA
  misc_feature 3..4: note = RNA
  misc_feature 5: note = DNA
  misc_feature 6: note = RNA
  misc_feature 7: note = DNA
  misc_feature 8..11: note = RNA
  misc_feature 12: note = DNA
  misc_feature 13..23: note = RNA
ttgaattagtgttctacaccatt

SEQ ID NO: 1207 - DNA, 23 bp, synthetic construct
  source 1..23: mol_type = other DNA
  modified_base 1: mod_base = OTHER; note = Vinyl-phosphonate-2'-O-methyluridine-3'-phosphate
  modified_base 3: mod_base = OTHER; note = 2'-O-methyluridine-3'-phosphate
  modified_base 4: mod_base = OTHER; note = 2'-O-methylguanosine-3'-phosphate
  modified_base 6: mod_base = OTHER; note = 2'-O-methyladenosine-3'-phosphate
  modified_base 8: mod_base = OTHER; note = 2'-O-methyluridine-3'-phosphate
  modified_base 9: mod_base = OTHER; note = 2'-O-methyladenosine-3'-phosphate
  modified_base 10: mod_base = OTHER; note = 2'-O-methylguanosine-3'-phosphate
  modified_base 11: mod_base = OTHER; note = 2'-O-methyluridine-3'-phosphate
  modified_base 13: mod_base = OTHER; note = 2'-O-methyluridine-3'-phosphate
  modified_base 14: mod_base = OTHER; note = 2'-fluorouridine-3'-phosphate
  modified_base 15: mod_base = OTHER; note = 2'-O-methylcytidine-3'-phosphate
  modified_base 16: mod_base = OTHER; note = 2'-O-methyluridine-3'-phosphate
  modified_base 17: mod_base = OTHER; note = 2'-O-methyladenosine-3'-phosphate
  modified_base 18: mod_base = OTHER; note = 2'-O-methylcytidine-3'-phosphate
  modified_base 19: mod_base = OTHER; note = 2'-O-methyladenosine-3'-phosphate
  modified_base 20: mod_base = OTHER; note = 2'-O-methylcytidine-3'-phosphate
  modified_base 21: mod_base = OTHER; note = 2'-O-methylcytidine-3'-phosphorothioate
  modified_base 22: mod_base = OTHER; note = 2'-O-methyladenosine-3'-phosphorothioate
  modified_base 23: mod_base = OTHER; note = 2'-O-methyluridine-3'-phosphate
  misc_feature 1: note = RNA
  misc_feature 2: note = DNA
  misc_feature 3..4: note = RNA
  misc_feature 5: note = DNA
  misc_feature 6: note = RNA
  misc_feature 7: note = DNA
  misc_feature 8..11: note = RNA
  misc_feature 12: note = DNA
  misc_feature 13..23: note = RNA
tatgaattagtgttctacaccat

SEQ ID NO: 1208 - DNA, 23 bp, synthetic construct
  source 1..23: mol_type = other DNA
  modified_base 1: mod_base = OTHER; note = Vinyl-phosphonate-2'-O-methyluridine-3'-phosphate
  modified_base 2: mod_base = OTHER; note = 2'-fluorouridine-3'-phosphate
  modified_base 3: mod_base = OTHER; note = 2'-O-methyladenosine-3'-phosphate
  modified_base 4: mod_base = OTHER; note = 2'-O-methyluridine-3'-phosphate
  modified_base 6: mod_base = OTHER; note = 2'-O-methyladenosine-3'-phosphate
  modified_base 7: mod_base = OTHER; note = Adenosine-glycol nucleic acid (GNA)
  modified_base 8: mod_base = OTHER; note = 2'-O-methyluridine-3'-phosphate
  modified_base 9: mod_base = OTHER; note = 2'-O-methyluridine-3'-phosphate
  modified_base 10: mod_base = OTHER; note = 2'-O-methyladenosine-3'-phosphate
  modified_base 11: mod_base = OTHER; note = 2'-O-methylguanosine-3'-phosphate
  modified_base 12: mod_base = OTHER; note = 2'-O-methyluridine-3'-phosphate
  modified_base 13: mod_base = OTHER; note = 2'-O-methylguanosine-3'-phosphate
  modified_base 14: mod_base = OTHER; note = 2'-fluorouridine-3'-phosphate
  modified_base 15: mod_base = OTHER; note = 2'-O-methyluridine-3'-phosphate
  modified_base 16: mod_base = OTHER; note = 2'-fluorocytidine-3'-phosphate
  modified_base 17: mod_base = OTHER; note = 2'-O-methyluridine-3'-phosphate
  modified_base 18: mod_base = OTHER; note = 2'-O-methyladenosine-3'-phosphate
  modified_base 19: mod_base = OTHER; note = 2'-O-methylcytidine-3'-phosphate
  modified_base 20: mod_base = OTHER; note = 2'-O-methyladenosine-3'-phosphate
  modified_base 21: mod_base = OTHER; note = 2'-O-methylcytidine-3'-phosphorothioate
  modified_base 22: mod_base = OTHER; note = 2'-O-methylcytidine-3'-phosphorothioate
  modified_base 23: mod_base = OTHER; note = 2'-O-methyladenosine-3'-phosphate
  misc_feature 1..4: note = RNA
  misc_feature 5: note = DNA
  misc_feature 6..23: note = RNA
ttatgaattagtgttctacacca

SEQ ID NO: 1209 - DNA, 23 bp, synthetic construct
  source 1..23: mol_type = other DNA
  modified_base 1: mod_base = OTHER; note = Vinyl-phosphonate-2'-O-methyluridine-3'-phosphate
  modified_base 2: mod_base = OTHER; note = 2'-fluorouridine-3'-phosphate
  modified_base 3: mod_base = OTHER; note = 2'-O-methyluridine-3'-phosphate
  modified_base 4: mod_base = OTHER; note = 2'-O-methyladenosine-3'-phosphate
  modified_base 6: mod_base = OTHER; note = 2'-O-methylguanosine-3'-phosphate
  modified_base 7: mod_base = OTHER; note = Adenosine-glycol nucleic acid (GNA)
  modified_base 8: mod_base = OTHER; note = 2'-O-methyladenosine-3'-phosphate
  modified_base 9: mod_base = OTHER; note = 2'-O-methyluridine-3'-phosphate
  modified_base 10: mod_base = OTHER; note = 2'-O-methyluridine-3'-phosphate
  modified_base 11: mod_base = OTHER; note = 2'-O-methyladenosine-3'-phosphate
  modified_base 12: mod_base = OTHER; note = 2'-O-methylguanosine-3'-phosphate
  modified_base 13: mod_base = OTHER; note = 2'-O-methyluridine-3'-phosphate
  modified_base 14: mod_base = OTHER; note = 2'-fluoroguanosine-3'-phosphate
  modified_base 15: mod_base = OTHER; note = 2'-O-methyluridine-3'-phosphate
  modified_base 16: mod_base = OTHER; note = 2'-fluorouridine-3'-phosphate
  modified_base 17: mod_base = OTHER; note = 2'-O-methylcytidine-3'-phosphate
  modified_base 18: mod_base = OTHER; note = 2'-O-methyluridine-3'-phosphate
  modified_base 19: mod_base = OTHER; note = 2'-O-methyladenosine-3'-phosphate
  modified_base 20: mod_base = OTHER; note = 2'-O-methylcytidine-3'-phosphate
  modified_base 21: mod_base = OTHER; note = 2'-O-methyladenosine-3'-phosphorothioate
  modified_base 22: mod_base = OTHER; note = 2'-O-methylcytidine-3'-phosphorothioate
  modified_base 23: mod_base = OTHER; note = 2'-O-methylcytidine-3'-phosphate
  misc_feature 1..4: note = RNA
  misc_feature 5: note = DNA
  misc_feature 6..23: note = RNA
tttatgaattagtgttctacacc

SEQ ID NO: 1210 - DNA, 23 bp, synthetic construct
  source 1..23: mol_type = other DNA
  modified_base 1: mod_base = OTHER; note = Vinyl-phosphonate-2'-O-methyluridine-3'-phosphate
  modified_base 3: mod_base = OTHER; note = 2'-O-methyluridine-3'-phosphate
  modified_base 4: mod_base = OTHER; note = 2'-O-methyluridine-3'-phosphate
  modified_base 6: mod_base = OTHER; note = 2'-O-methyluridine-3'-phosphate
  modified_base 8: mod_base = OTHER; note = 2'-O-methyladenosine-3'-phosphate
  modified_base 9: mod_base = OTHER; note = 2'-O-methyladenosine-3'-phosphate
  modified_base 10: mod_base = OTHER; note = 2'-O-methyluridine-3'-phosphate
  modified_base 11: mod_base = OTHER; note = 2'-O-methyluridine-3'-phosphate
  modified_base 13: mod_base = OTHER; note = 2'-O-methylguanosine-3'-phosphate
  modified_base 14: mod_base = OTHER; note = 2'-fluorouridine-3'-phosphate
  modified_base 15: mod_base = OTHER; note = 2'-O-methylguanosine-3'-phosphate
  modified_base 16: mod_base = OTHER; note = 2'-O-methyluridine-3'-phosphate
  modified_base 17: mod_base = OTHER; note = 2'-O-methyluridine-3'-phosphate
  modified_base 18: mod_base = OTHER; note = 2'-O-methylcytidine-3'-phosphate
  modified_base 19: mod_base = OTHER; note = 2'-O-methyluridine-3'-phosphate
  modified_base 20: mod_base = OTHER; note = 2'-O-methyladenosine-3'-phosphate
  modified_base 21: mod_base = OTHER; note = 2'-O-methylcytidine-3'-phosphorothioate
  modified_base 22: mod_base = OTHER; note = 2'-O-methyladenosine-3'-phosphorothioate
  modified_base 23: mod_base = OTHER; note = 2'-O-methylcytidine-3'-phosphate
  misc_feature 1: note = RNA
  misc_feature 2: note = DNA
  misc_feature 3..4: note = RNA
  misc_feature 5: note = DNA
  misc_feature 6: note = RNA
  misc_feature 7: note = DNA
  misc_feature 8..11: note = RNA
  misc_feature 12: note = DNA
  misc_feature 13..23: note = RNA
tattatgaattagtgttctacac

SEQ ID NO: 1211 - DNA, 23 bp, synthetic construct
  source 1..23: mol_type = other DNA
  modified_base 1: mod_base = OTHER; note = Vinyl-phosphonate-2'-O-methyluridine-3'-phosphate
  modified_base 3: mod_base = OTHER; note = 2'-O-methyladenosine-3'-phosphate
  modified_base 4: mod_base = OTHER; note = 2'-O-methyluridine-3'-phosphate
  modified_base 6: mod_base = OTHER; note = 2'-O-methyladenosine-3'-phosphate
  modified_base 8: mod_base = OTHER; note = 2'-O-methylguanosine-3'-phosphate
  modified_base 9: mod_base = OTHER; note = 2'-O-methyladenosine-3'-phosphate
  modified_base 10: mod_base = OTHER; note = 2'-O-methyladenosine-3'-phosphate
  modified_base 11: mod_base = OTHER; note = 2'-O-methyluridine-3'-phosphate
  modified_base 13: mod_base = OTHER; note = 2'-O-methyladenosine-3'-phosphate
  modified_base 14: mod_base = OTHER; note = 2'-fluoroguanosine-3'-phosphate
  modified_base 15: mod_base = OTHER; note = 2'-O-methyluridine-3'-phosphate
  modified_base 16: mod_base = OTHER; note = 2'-O-methylguanosine-3'-phosphate
  modified_base 17: mod_base = OTHER; note = 2'-O-methyluridine-3'-phosphate
  modified_base 18: mod_base = OTHER; note = 2'-O-methyluridine-3'-phosphate
  modified_base 19: mod_base = OTHER; note = 2'-O-methylcytidine-3'-phosphate
  modified_base 20: mod_base = OTHER; note = 2'-O-methyluridine-3'-phosphate
  modified_base 21: mod_base = OTHER; note = 2'-O-methyladenosine-3'-phosphorothioate
  modified_base 22: mod_base = OTHER; note = 2'-O-methylcytidine-3'-phosphorothioate
  modified_base 23: mod_base = OTHER; note = 2'-O-methyladenosine-3'-phosphate
  misc_feature 1: note = RNA
  misc_feature 2: note = DNA
  misc_feature 3..4: note = RNA
  misc_feature 5: note = DNA
  misc_feature 6: note = RNA
  misc_feature 7: note = DNA
  misc_feature 8..11: note = RNA
  misc_feature 12: note = DNA
  misc_feature 13..23: note = RNA
tgattatgaattagtgttctaca

SEQ ID NO: 1212 - DNA, 23 bp, synthetic construct
  source 1..23: mol_type = other DNA
  modified_base 1: mod_base = OTHER; note = Vinyl-phosphonate-2'-O-methyluridine-3'-phosphate
  modified_base 3: mod_base = OTHER; note = 2'-O-methylguanosine-3'-phosphate
  modified_base 4: mod_base = OTHER; note = 2'-O-methyladenosine-3'-phosphate
  modified_base 6: mod_base = OTHER; note = 2'-O-methyluridine-3'-phosphate
  modified_base 8: mod_base = OTHER; note = 2'-O-methyluridine-3'-phosphate
  modified_base 9: mod_base = OTHER; note = 2'-O-methylguanosine-3'-phosphate
  modified_base 10: mod_base = OTHER; note = 2'-O-methyladenosine-3'-phosphate
  modified_base 11: mod_base = OTHER; note = 2'-O-methyladenosine-3'-phosphate
  modified_base 13: mod_base = OTHER; note = 2'-O-methyluridine-3'-phosphate
  modified_base 14: mod_base = OTHER; note = 2'-fluoroadenosine-3'-phosphate
  modified_base 15: mod_base = OTHER; note = 2'-O-methylguanosine-3'-phosphate
  modified_base 16: mod_base = OTHER; note = 2'-O-methyluridine-3'-phosphate
  modified_base 17: mod_base = OTHER; note = 2'-O-methylguanosine-3'-phosphate
  modified_base 18: mod_base = OTHER; note = 2'-O-methyluridine-3'-phosphate
  modified_base 19: mod_base = OTHER; note = 2'-O-methyluridine-3'-phosphate
  modified_base 20: mod_base = OTHER; note = 2'-O-methylcytidine-3'-phosphate
  modified_base 21: mod_base = OTHER; note = 2'-O-methyluridine-3'-phosphorothioate
  modified_base 22: mod_base = OTHER; note = 2'-O-methyladenosine-3'-phosphorothioate
  modified_base 23: mod_base = OTHER; note = 2'-O-methylcytidine-3'-phosphate
  misc_feature 1: note = RNA
  misc_feature 2: note = DNA
  misc_feature 3..4: note = RNA
  misc_feature 5: note = DNA
  misc_feature 6: note = RNA
  misc_feature 7: note = DNA
  misc_feature 8..11: note = RNA
  misc_feature 12: note = DNA
  misc_feature 13..23: note = RNA
ttgattatgaattagtgttctac

SEQ ID NO: 1213 - DNA, 23 bp, synthetic construct
  source 1..23: mol_type = other DNA
  modified_base 1: mod_base = OTHER; note = Vinyl-phosphonate-2'-O-methyluridine-3'-phosphate
  modified_base 2: mod_base = OTHER; note = 2'-fluorouridine-3'-phosphate
  modified_base 3: mod_base = OTHER; note = 2'-O-methylguanosine-3'-phosphate
  modified_base 4: mod_base = OTHER; note = 2'-O-methyladenosine-3'-phosphate
  modified_base 6: mod_base = OTHER; note = 2'-O-methyluridine-3'-phosphate
  modified_base 7: mod_base = OTHER; note = Adenosine-glycol nucleic acid (GNA)
  modified_base 8: mod_base = OTHER; note = 2'-O-methyluridine-3'-phosphate
  modified_base 9: mod_base = OTHER; note = 2'-O-methylguanosine-3'-phosphate
  modified_base 10: mod_base = OTHER; note = 2'-O-methyladenosine-3'-phosphate
  modified_base 11: mod_base = OTHER; note = 2'-O-methyladenosine-3'-phosphate
  modified_base 12: mod_base = OTHER; note = 2'-O-methyluridine-3'-phosphate
  modified_base 13: mod_base = OTHER; note = 2'-O-methyluridine-3'-phosphate
  modified_base 14: mod_base = OTHER; note = 2'-fluoroadenosine-3'-phosphate
  modified_base 15: mod_base = OTHER; note = 2'-O-methylguanosine-3'-phosphate
  modified_base 16: mod_base = OTHER; note = 2'-fluorouridine-3'-phosphate
  modified_base 17: mod_base = OTHER; note = 2'-O-methylguanosine-3'-phosphate
  modified_base 18: mod_base = OTHER; note = 2'-O-methyluridine-3'-phosphate
  modified_base 19: mod_base = OTHER; note = 2'-O-methyluridine-3'-phosphate
  modified_base 20: mod_base = OTHER; note = 2'-O-methylcytidine-3'-phosphate
  modified_base 21: mod_base = OTHER; note = 2'-O-methyluridine-3'-phosphorothioate
  modified_base 22: mod_base = OTHER; note = 2'-O-methyladenosine-3'-phosphorothioate
  modified_base 23: mod_base = OTHER; note = 2'-O-methylcytidine-3'-phosphate
  misc_feature 1..4: note = RNA
  misc_feature 5: note = DNA
  misc_feature 6..23: note = RNA
ttgattatgaattagtgttctac

SEQ ID NO: 1214 - DNA, 23 bp, synthetic construct
  source 1..23: mol_type = other DNA
  modified_base 1: mod_base = OTHER; note = Vinyl-phosphonate-2'-O-methyluridine-3'-phosphate
  modified_base 3: mod_base = OTHER; note = 2'-O-methyluridine-3'-phosphate
  modified_base 4: mod_base = OTHER; note = 2'-O-methylguanosine-3'-phosphate
  modified_base 6: mod_base = OTHER; note = 2'-O-methyluridine-3'-phosphate
  modified_base 8: mod_base = OTHER; note = 2'-O-methyladenosine-3'-phosphate
  modified_base 9: mod_base = OTHER; note = 2'-O-methyluridine-3'-phosphate
  modified_base 10: mod_base = OTHER; note = 2'-O-methylguanosine-3'-phosphate
  modified_base 11: mod_base = OTHER; note = 2'-O-methyladenosine-3'-phosphate
  modified_base 13: mod_base = OTHER; note = 2'-O-methyluridine-3'-phosphate
  modified_base 14: mod_base = OTHER; note = 2'-fluorouridine-3'-phosphate
  modified_base 15: mod_base = OTHER; note = 2'-O-methyladenosine-3'-phosphate
  modified_base 16: mod_base = OTHER; note = 2'-O-methylguanosine-3'-phosphate
  modified_base 17: mod_base = OTHER; note = 2'-O-methyluridine-3'-phosphate
  modified_base 18: mod_base = OTHER; note = 2'-O-methylguanosine-3'-phosphate
  modified_base 19: mod_base = OTHER; note = 2'-O-methyluridine-3'-phosphate
  modified_base 20: mod_base = OTHER; note = 2'-O-methyluridine-3'-phosphate
  modified_base 21: mod_base = OTHER; note = 2'-O-methylcytidine-3'-phosphorothioate
  modified_base 22: mod_base = OTHER; note = 2'-O-methyluridine-3'-phosphorothioate
  modified_base 23: mod_base = OTHER; note = 2'-O-methyladenosine-3'-phosphate
  misc_feature 1: note = RNA
  misc_feature 2: note = DNA
  misc_feature 3..4: note = RNA
  misc_feature 5: note = DNA
  misc_feature 6: note = RNA
  misc_feature 7: note = DNA
  misc_feature 8..11: note = RNA
  misc_feature 12: note = DNA
  misc_feature 13..23: note = RNA
tgtgattatgaattagtgttcta

SEQ ID NO: 1215 - DNA, 23 bp, synthetic construct
  source 1..23: mol_type = other DNA
  modified_base 1: mod_base = OTHER; note = Vinyl-phosphonate-2'-O-methyluridine-3'-phosphate
  modified_base 2: mod_base = OTHER; note = 2'-fluoroadenosine-3'-phosphate
  modified_base 3: mod_base = OTHER; note = 2'-O-methylguanosine-3'-phosphate
  modified_base 4: mod_base = OTHER; note = 2'-O-methyluridine-3'-phosphate
  modified_base 6: mod_base = OTHER; note = 2'-O-methyladenosine-3'-phosphate
  modified_base 7: mod_base = OTHER; note = Thymidine-glycol nucleic acid (GNA) S-Isomer
  modified_base 8: mod_base = OTHER; note = 2'-O-methyluridine-3'-phosphate
  modified_base 9: mod_base = OTHER; note = 2'-O-methyladenosine-3'-phosphate
  modified_base 10: mod_base = OTHER; note = 2'-O-methyluridine-3'-phosphate
  modified_base 11: mod_base = OTHER; note = 2'-O-methylguanosine-3'-phosphate
  modified_base 12: mod_base = OTHER; note = 2'-O-methyladenosine-3'-phosphate
  modified_base 13: mod_base = OTHER; note = 2'-O-methyladenosine-3'-phosphate
  modified_base 14: mod_base = OTHER; note = 2'-fluorouridine-3'-phosphate
  modified_base 15: mod_base = OTHER; note = 2'-O-methyluridine-3'-phosphate
  modified_base 16: mod_base = OTHER; note = 2'-fluoroadenosine-3'-phosphate
  modified_base 17: mod_base = OTHER; note = 2'-O-methylguanosine-3'-phosphate
  modified_base 18: mod_base = OTHER; note = 2'-O-methyluridine-3'-phosphate
  modified_base 19: mod_base = OTHER; note = 2'-O-methylguanosine-3'-phosphate
  modified_base 20: mod_base = OTHER; note = 2'-O-methyluridine-3'-phosphate
  modified_base 21: mod_base = OTHER; note = 2'-O-methyluridine-3'-phosphorothioate
  modified_base 22: mod_base = OTHER; note = 2'-O-methylcytidine-3'-phosphorothioate
  modified_base 23: mod_base = OTHER; note = 2'-O-methyluridine-3'-phosphate
  misc_feature 1..4: note = RNA
  misc_feature 5: note = DNA
  misc_feature 6: note = RNA
  misc_feature 7: note = DNA
  misc_feature 8..23: note = RNA
tagtgattatgaattagtgttct

SEQ ID NO: 1216 - DNA, 23 bp, synthetic construct
  source 1..23: mol_type = other DNA
  modified_base 1: mod_base = OTHER; note = Vinyl-phosphonate-2'-O-methyluridine-3'-phosphate
  modified_base 3: mod_base = OTHER; note = 2'-O-methyladenosine-3'-phosphate
  modified_base 4: mod_base = OTHER; note = 2'-O-methylguanosine-3'-phosphate
  modified_base 6: mod_base = OTHER; note = 2'-O-methyladenosine-3'-phosphate
  modified_base 8: mod_base = OTHER; note = 2'-O-methyladenosine-3'-phosphate
  modified_base 9: mod_base = OTHER; note = 2'-O-methylcytidine-3'-phosphate
  modified_base 10: mod_base = OTHER; note = 2'-O-methyluridine-3'-phosphate
  modified_base 11: mod_base = OTHER; note = 2'-O-methyladenosine-3'-phosphate
  modified_base 13: mod_base = OTHER; note = 2'-O-methyluridine-3'-phosphate
  modified_base 14: mod_base = OTHER; note = 2'-fluorouridine-3'-phosphate
  modified_base 15: mod_base = OTHER; note = 2'-O-methylguanosine-3'-phosphate
  modified_base 16: mod_base = OTHER; note = 2'-O-methylguanosine-3'-phosphate
  modified_base 17: mod_base = OTHER; note = 2'-O-methyladenosine-3'-phosphate
  modified_base 18: mod_base = OTHER; note = 2'-O-methylcytidine-3'-phosphate
  modified_base 19: mod_base = OTHER; note = 2'-O-methylcytidine-3'-phosphate
  modified_base 20: mod_base = OTHER; note = 2'-O-methyladenosine-3'-phosphate
  modified_base 21: mod_base = OTHER; note = 2'-O-methyluridine-3'-phosphorothioate
  modified_base 22: mod_base = OTHER; note = 2'-O-methyluridine-3'-phosphorothioate
  modified_base 23: mod_base = OTHER; note = 2'-O-methyluridine-3'-phosphate
  misc_feature 1: note = RNA
  misc_feature 2: note = DNA
  misc_feature 3..4: note = RNA
  misc_feature 5: note = DNA
  misc_feature 6: note = RNA
  misc_feature 7: note = DNA
  misc_feature 8..11: note = RNA
  misc_feature 12: note = DNA
  misc_feature 13..23: note = RNA
taaggaaactaattggaccattt

SEQ ID NO: 1217 - DNA, 23 bp, synthetic construct
  source 1..23: mol_type = other DNA
  modified_base 1: mod_base = OTHER; note = Vinyl-phosphonate-2'-O-methyluridine-3'-phosphate
  modified_base 3: mod_base = OTHER; note = 2'-O-methyluridine-3'-phosphate
  modified_base 4: mod_base = OTHER; note = 2'-O-methyladenosine-3'-phosphate
  modified_base 6: mod_base = OTHER; note = 2'-O-methylcytidine-3'-phosphate
  modified_base 8: mod_base = OTHER; note = 2'-O-methyladenosine-3'-phosphate
  modified_base 9: mod_base = OTHER; note = 2'-O-methyluridine-3'-phosphate
  modified_base 10: mod_base = OTHER; note = 2'-O-methyladenosine-3'-phosphate
  modified_base 11: mod_base = OTHER; note = 2'-O-methylcytidine-3'-phosphate
  modified_base 13: mod_base = OTHER; note = 2'-O-methyluridine-3'-phosphate
  modified_base 14: mod_base = OTHER; note = 2'-fluoroadenosine-3'-phosphate
  modified_base 15: mod_base = OTHER; note = 2'-O-methyluridine-3'-phosphate
  modified_base 16: mod_base = OTHER; note = 2'-O-methylcytidine-3'-phosphate
  modified_base 17: mod_base = OTHER; note = 2'-O-methylcytidine-3'-phosphate
  modified_base 18: mod_base = OTHER; note = 2'-O-methylcytidine-3'-phosphate
  modified_base 19: mod_base = OTHER; note = 2'-O-methyladenosine-3'-phosphate
  modified_base 20: mod_base = OTHER; note = 2'-O-methyladenosine-3'-phosphate
  modified_base 21: mod_base = OTHER; note = 2'-O-methyladenosine-3'-phosphorothioate
  modified_base 22: mod_base = OTHER; note = 2'-O-methyluridine-3'-phosphorothioate
  modified_base 23: mod_base = OTHER; note = 2'-O-methyladenosine-3'-phosphate
  misc_feature 1: note = RNA
  misc_feature 2: note = DNA
  misc_feature 3..4: note = RNA
  misc_feature 5: note = DNA
  misc_feature 6: note = RNA
  misc_feature 7: note = DNA
  misc_feature 8..11: note = RNA
  misc_feature 12: note = DNA
  misc_feature 13..23: note = RNA
tctacccatacatatcccaaata

SEQ ID NO: 1218 - DNA, 23 bp, synthetic construct
  source 1..23: mol_type = other DNA
  modified_base 1: mod_base = OTHER; note = Vinyl-phosphonate-2'-O-methyluridine-3'-phosphate
  modified_base 2: mod_base = OTHER; note = 2'-fluorouridine-3'-phosphate
  modified_base 3: mod_base = OTHER; note = 2'-O-methylguanosine-3'-phosphate
  modified_base 4: mod_base = OTHER; note = 2'-O-methyladenosine-3'-phosphate
  modified_base 6: mod_base = OTHER; note = 2'-O-methyluridine-3'-phosphate
  modified_base 7: mod_base = OTHER; note = Thymidine-glycol nucleic acid (GNA) S-Isomer
  modified_base 8: mod_base = OTHER; note = 2'-O-methyladenosine-3'-phosphate
  modified_base 9: mod_base = OTHER; note = 2'-O-methylcytidine-3'-phosphate
  modified_base 10: mod_base = OTHER; note = 2'-O-methylcytidine-3'-phosphate
  modified_base 11: mod_base = OTHER; note = 2'-O-methylcytidine-3'-phosphate
  modified_base 12: mod_base = OTHER; note = 2'-O-methyluridine-3'-phosphate
  modified_base 13: mod_base = OTHER; note = 2'-O-methyladenosine-3'-phosphate
  modified_base 14: mod_base = OTHER; note = 2'-fluorocytidine-3'-phosphate
  modified_base 15: mod_base = OTHER; note = 2'-O-methylcytidine-3'-phosphate
  modified_base 16: mod_base = OTHER; note = 2'-fluorocytidine-3'-phosphate
  modified_base 17: mod_base = OTHER; note = 2'-O-methyladenosine-3'-phosphate
  modified_base 18: mod_base = OTHER; note = 2'-O-methyluridine-3'-phosphate
  modified_base 19: mod_base = OTHER; note = 2'-O-methyladenosine-3'-phosphate
  modified_base 20: mod_base = OTHER; note = 2'-O-methylcytidine-3'-phosphate
  modified_base 21: mod_base = OTHER; note = 2'-O-methyladenosine-3'-phosphorothioate
  modified_base 22: mod_base = OTHER; note = 2'-O-methyluridine-3'-phosphorothioate
  modified_base 23: mod_base = OTHER; note = 2'-O-methyladenosine-3'-phosphate
  misc_feature 1..4: note = RNA
  misc_feature 5: note = DNA
  misc_feature 6: note = RNA
  misc_feature 7: note = DNA
  misc_feature 8..23: note = RNA
ttgatttaccctacccatacata

SEQ ID NO: 1219 - DNA, 23 bp, synthetic construct
  source 1..23: mol_type = other DNA
  modified_base 1: mod_base = OTHER; note = Vinyl-phosphonate-2'-O-methyluridine-3'-phosphate
  modified_base 2: mod_base = OTHER; note = 2'-fluorouridine-3'-phosphate
  modified_base 3: mod_base = OTHER; note = 2'-O-methyladenosine-3'-phosphate
  modified_base 4: mod_base = OTHER; note = 2'-O-methylcytidine-3'-phosphate
  modified_base 6: mod_base = OTHER; note = 2'-O-methylguanosine-3'-phosphate
  modified_base 7: mod_base = OTHER; note = Adenosine-glycol nucleic acid (GNA)
  modified_base 8: mod_base = OTHER; note = 2'-O-methyluridine-3'-phosphate
  modified_base 9: mod_base = OTHER; note = 2'-O-methyluridine-3'-phosphate
  modified_base 10: mod_base = OTHER; note = 2'-O-methyluridine-3'-phosphate
  modified_base 11: mod_base = OTHER; note = 2'-O-methyladenosine-3'-phosphate
  modified_base 12: mod_base = OTHER; note = 2'-O-methylcytidine-3'-phosphate
  modified_base 13: mod_base = OTHER; note = 2'-O-methylcytidine-3'-phosphate
  modified_base 14: mod_base = OTHER; note = 2'-fluorocytidine-3'-phosphate
  modified_base 15: mod_base = OTHER; note = 2'-O-methyluridine-3'-phosphate
  modified_base 16: mod_base = OTHER; note = 2'-fluoroadenosine-3'-phosphate
  modified_base 17: mod_base = OTHER; note = 2'-O-methylcytidine-3'-phosphate
  modified_base 18: mod_base = OTHER; note = 2'-O-methylcytidine-3'-phosphate
  modified_base 19: mod_base = OTHER; note = 2'-O-methylcytidine-3'-phosphate
  modified_base 20: mod_base = OTHER; note = 2'-O-methyladenosine-3'-phosphate
  modified_base 21: mod_base = OTHER; note = 2'-O-methyluridine-3'-phosphorothioate
  modified_base 22: mod_base = OTHER; note = 2'-O-methyladenosine-3'-phosphorothioate
  modified_base 23: mod_base = OTHER; note = 2'-O-methylcytidine-3'-phosphate
  misc_feature 1..4: note = RNA
  misc_feature 5: note = DNA
  misc_feature 6..23: note = RNA
ttactgatttaccctacccatac

SEQ ID NO: 1220 - DNA, 23 bp, synthetic construct
  source 1..23: mol_type = other DNA
  modified_base 1: mod_base = OTHER; note = Vinyl-phosphonate-2'-O-methyluridine-3'-phosphate
  modified_base 3: mod_base = OTHER; note = 2'-O-methyluridine-3'-phosphate
  modified_base 4: mod_base = OTHER; note = 2'-O-methylcytidine-3'-phosphate
  modified_base 6: mod_base = OTHER; note = 2'-O-methyluridine-3'-phosphate
  modified_base 8: mod_base = OTHER; note = 2'-O-methylcytidine-3'-phosphate
  modified_base 9: mod_base = OTHER; note = 2'-O-methyluridine-3'-phosphate
  modified_base 10: mod_base = OTHER; note = 2'-O-methylguanosine-3'-phosphate
  modified_base 11: mod_base = OTHER; note = 2'-O-methyladenosine-3'-phosphate
  modified_base 13: mod_base = OTHER; note = 2'-O-methyluridine-3'-phosphate
  modified_base 14: mod_base = OTHER; note = 2'-fluorouridine-3'-phosphate
  modified_base 15: mod_base = OTHER; note = 2'-O-methyladenosine-3'-phosphate
  modified_base 16: mod_base = OTHER; note = 2'-O-methylcytidine-3'-phosphate
  modified_base 17: mod_base = OTHER; note = 2'-O-methylcytidine-3'-phosphate
  modified_base 18: mod_base = OTHER; note = 2'-O-methylcytidine-3'-phosphate
  modified_base 19: mod_base = OTHER; note = 2'-O-methyluridine-3'-phosphate
  modified_base 20: mod_base = OTHER; note = 2'-O-methyladenosine-3'-phosphate
  modified_base 21: mod_base = OTHER; note = 2'-O-methylcytidine-3'-phosphorothioate
  modified_base 22: mod_base = OTHER; note = 2'-O-methylcytidine-3'-phosphorothioate
  modified_base 23: mod_base = OTHER; note = 2'-O-methylcytidine-3'-phosphate
  misc_feature 1: note = RNA
  misc_feature 2: note = DNA
  misc_feature 3..4: note = RNA
  misc_feature 5: note = DNA
  misc_feature 6: note = RNA
  misc_feature 7: note = DNA
  misc_feature 8..11: note = RNA
  misc_feature 12: note = DNA
  misc_feature 13..23: note = RNA
tctcttactgatttaccctaccc

SEQ ID NO: 1221 - DNA, 23 bp, synthetic construct
  source 1..23: mol_type = other DNA
  modified_base 1: mod_base = OTHER; note = Vinyl-phosphonate-2'-O-methyluridine-3'-phosphate
  modified_base 2: mod_base = OTHER; note = 2'-fluoroadenosine-3'-phosphate
  modified_base 3: mod_base = OTHER; note = 2'-O-methylcytidine-3'-phosphate
  modified_base 4: mod_base = OTHER; note = 2'-O-methylcytidine-3'-phosphate
  modified_base 6: mod_base = OTHER; note = 2'-O-methylcytidine-3'-phosphate
  modified_base 7: mod_base = OTHER; note = Thymidine-glycol nucleic acid (GNA) S-Isomer
  modified_base 8: mod_base = OTHER; note = 2'-O-methyluridine-3'-phosphate
  modified_base 9: mod_base = OTHER; note = 2'-O-methyladenosine-3'-phosphate
  modified_base 10: mod_base = OTHER; note = 2'-O-methylcytidine-3'-phosphate
  modified_base 11: mod_base = OTHER; note = 2'-O-methyluridine-3'-phosphate
  modified_base 12: mod_base = OTHER; note = 2'-O-methylguanosine-3'-phosphate
  modified_base 13: mod_base = OTHER; note = 2'-O-methyladenosine-3'-phosphate
  modified_base 14: mod_base = OTHER; note = 2'-fluorouridine-3'-phosphate
  modified_base 15: mod_base = OTHER; note = 2'-O-methyluridine-3'-phosphate
  modified_base 16: mod_base = OTHER; note = 2'-fluorouridine-3'-phosphate
  modified_base 17: mod_base = OTHER; note = 2'-O-methyladenosine-3'-phosphate
  modified_base 18: mod_base = OTHER; note = 2'-O-methylcytidine-3'-phosphate
  modified_base 19: mod_base = OTHER; note = 2'-O-methylcytidine-3'-phosphate
  modified_base 20: mod_base = OTHER; note = 2'-O-methylcytidine-3'-phosphate
  modified_base 21: mod_base = OTHER; note = 2'-O-methyluridine-3'-phosphorothioate
  modified_base 22: mod_base = OTHER; note = 2'-O-methyladenosine-3'-phosphorothioate
  modified_base 23: mod_base = OTHER; note = 2'-O-methylcytidine-3'-phosphate
  misc_feature 1..4: note = RNA
  misc_feature 5: note = DNA
  misc_feature 6: note = RNA
  misc_feature 7: note = DNA
  misc_feature 8..23: note = RNA
tacctcttactgatttaccctac

SEQ ID NO: 1222 - DNA, 23 bp, synthetic construct
  source 1..23: mol_type = other DNA
  modified_base 1: mod_base = OTHER; note = Vinyl-phosphonate-2'-O-methyluridine-3'-phosphate
  modified_base 3: mod_base = OTHER; note = 2'-O-methyladenosine-3'-phosphate
  modified_base 4: mod_base = OTHER; note = 2'-O-methylcytidine-3'-phosphate
  modified_base 6: mod_base = OTHER; note = 2'-O-methyluridine-3'-phosphate
  modified_base 8: mod_base = OTHER; note = 2'-O-methyluridine-3'-phosphate
  modified_base 9: mod_base = OTHER; note = 2'-O-methyluridine-3'-phosphate
  modified_base 10: mod_base = OTHER; note = 2'-O-methyladenosine-3'-phosphate
  modified_base 11: mod_base = OTHER; note = 2'-O-methylcytidine-3'-phosphate
  modified_base 13: mod_base = OTHER; note = 2'-O-methylguanosine-3'-phosphate
  modified_base 14: mod_base = OTHER; note = 2'-fluoroadenosine-3'-phosphate
  modified_base 15: mod_base = OTHER; note = 2'-O-methyluridine-3'-phosphate
  modified_base 16: mod_base = OTHER; note = 2'-O-methyluridine-3'-phosphate
  modified_base 17: mod_base = OTHER; note = 2'-O-methyluridine-3'-phosphate
  modified_base 18: mod_base = OTHER; note = 2'-O-methyladenosine-3'-phosphate
  modified_base 19: mod_base = OTHER; note = 2'-O-methylcytidine-3'-phosphate
  modified_base 20: mod_base = OTHER; note = 2'-O-methylcytidine-3'-phosphate
  modified_base 21: mod_base = OTHER; note = 2'-O-methylcytidine-3'-phosphorothioate
  modified_base 22: mod_base = OTHER; note = 2'-O-methyluridine-3'-phosphorothioate
  modified_base 23: mod_base = OTHER; note = 2'-O-methyladenosine-3'-phosphate
  misc_feature 1: note = RNA
  misc_feature 2: note = DNA
  misc_feature 3..4: note = RNA
  misc_feature 5: note = DNA
  misc_feature 6: note = RNA
  misc_feature 7: note = DNA
  misc_feature 8..11: note = RNA
  misc_feature 12: note = DNA
  misc_feature 13..23: note = RNA
tcacctcttactgatttacccta

SEQ ID NO: 1223 - DNA, 23 bp, synthetic construct
  source 1..23: mol_type = other DNA
  modified_base 1: mod_base = OTHER; note = Vinyl-phosphonate-2'-O-methyluridine-3'-phosphate
  modified_base 3: mod_base = OTHER; note = 2'-O-methyladenosine-3'-phosphate
  modified_base 4: mod_base = OTHER; note = 2'-O-methylcytidine-3'-phosphate
  modified_base 6: mod_base = OTHER; note = 2'-O-methylcytidine-3'-phosphate
  modified_base 8: mod_base = OTHER; note = 2'-O-methyluridine-3'-phosphate
  modified_base 9: mod_base = OTHER; note = 2'-O-methylcytidine-3'-phosphate
  modified_base 10: mod_base = OTHER; note = 2'-O-methyluridine-3'-phosphate
  modified_base 11: mod_base = OTHER; note = 2'-O-methyluridine-3'-phosphate
  modified_base 13: mod_base = OTHER; note = 2'-O-methylcytidine-3'-phosphate
  modified_base 14: mod_base = OTHER; note = 2'-fluorouridine-3'-phosphate
  modified_base 15: mod_base = OTHER; note = 2'-O-methylguanosine-3'-phosphate
  modified_base 16: mod_base = OTHER; note = 2'-O-methyladenosine-3'-phosphate
  modified_base 17: mod_base = OTHER; note = 2'-O-methyluridine-3'-phosphate
  modified_base 18: mod_base = OTHER; note = 2'-O-methyluridine-3'-phosphate
  modified_base 19: mod_base = OTHER; note = 2'-O-methyluridine-3'-phosphate
  modified_base 20: mod_base = OTHER; note = 2'-O-methyladenosine-3'-phosphate
  modified_base 21: mod_base = OTHER; note = 2'-O-methylcytidine-3'-phosphorothioate
  modified_base 22: mod_base = OTHER; note = 2'-O-methylcytidine-3'-phosphorothioate
  modified_base 23: mod_base = OTHER; note = 2'-O-methylcytidine-3'-phosphate
  misc_feature 1: note = RNA
  misc_feature 2: note = DNA
  misc_feature 3..4: note = RNA
  misc_feature 5: note = DNA
  misc_feature 6: note = RNA
  misc_feature 7: note = DNA
  misc_feature 8..11: note = RNA
  misc_feature 12: note = DNA
  misc_feature 13..23: note = RNA
taacacctcttactgatttaccc

SEQ ID NO: 1224 - DNA, 23 bp, synthetic construct
  source 1..23: mol_type = other DNA
  modified_base 1: mod_base = OTHER; note = Vinyl-phosphonate-2'-O-methyluridine-3'-phosphate
  modified_base 2: mod_base = OTHER; note = 2'-fluoroadenosine-3'-phosphate
  modified_base 3: mod_base = OTHER; note = 2'-O-methyluridine-3'-phosphate
  modified_base 4: mod_base = OTHER; note = 2'-O-methyladenosine-3'-phosphate
  modified_base 6: mod_base = OTHER; note = 2'-O-methylcytidine-3'-phosphate
  modified_base 7: mod_base = OTHER; note = Adenosine-glycol nucleic acid (GNA)
  modified_base 8: mod_base = OTHER; note = 2'-O-methylcytidine-3'-phosphate
  modified_base 9: mod_base = OTHER; note = 2'-O-methylcytidine-3'-phosphate
  modified_base 10: mod_base = OTHER; note = 2'-O-methyluridine-3'-phosphate
  modified_base 11: mod_base = OTHER; note = 2'-O-methylcytidine-3'-phosphate
  modified_base 12: mod_base = OTHER; note = 2'-O-methyluridine-3'-phosphate
  modified_base 13: mod_base = OTHER; note = 2'-O-methyluridine-3'-phosphate
  modified_base 14: mod_base = OTHER; note = 2'-fluoroadenosine-3'-phosphate
  modified_base 15: mod_base = OTHER; note = 2'-O-methylcytidine-3'-phosphate
  modified_base 16: mod_base = OTHER; note = 2'-fluorouridine-3'-phosphate
  modified_base 17: mod_base = OTHER; note = 2'-O-methylguanosine-3'-phosphate
  modified_base 18: mod_base = OTHER; note = 2'-O-methyladenosine-3'-phosphate
  modified_base 19: mod_base = OTHER; note = 2'-O-methyluridine-3'-phosphate
  modified_base 20: mod_base = OTHER; note = 2'-O-methyluridine-3'-phosphate
  modified_base 21: mod_base = OTHER; note = 2'-O-methyluridine-3'-phosphorothioate
  modified_base 22: mod_base = OTHER; note = 2'-O-methyladenosine-3'-phosphorothioate
  modified_base 23: mod_base = OTHER; note = 2'-O-methylcytidine-3'-phosphate
  misc_feature 1..4: note = RNA
  misc_feature 5: note = DNA
  misc_feature 6..23: note = RNA
tataacacctcttactgatttac

SEQ ID NO: 1225 - DNA, 23 bp, synthetic construct
  source 1..23: mol_type = other DNA
  modified_base 1: mod_base = OTHER; note = Vinyl-phosphonate-2'-O-methyluridine-3'-phosphate
  modified_base 3: mod_base = OTHER; note = 2'-O-methyladenosine-3'-phosphate
  modified_base 4: mod_base = OTHER; note = 2'-O-methyluridine-3'-phosphate
  modified_base 6: mod_base = OTHER; note = 2'-O-methyladenosine-3'-phosphate
  modified_base 8: mod_base = OTHER; note = 2'-O-methyladenosine-3'-phosphate
  modified_base 9: mod_base = OTHER; note = 2'-O-methylcytidine-3'-phosphate
  modified_base 10: mod_base = OTHER; note = 2'-O-methylcytidine-3'-phosphate
  modified_base 11: mod_base = OTHER; note = 2'-O-methyluridine-3'-phosphate
  modified_base 13: mod_base = OTHER; note = 2'-O-methyluridine-3'-phosphate
  modified_base 14: mod_base = OTHER; note = 2'-fluorouridine-3'-phosphate
  modified_base 15: mod_base = OTHER; note = 2'-O-methyladenosine-3'-phosphate
  modified_base 16: mod_base = OTHER; note = 2'-O-methylcytidine-3'-phosphate
  modified_base 17: mod_base = OTHER; note = 2'-O-methyluridine-3'-phosphate
  modified_base 18: mod_base = OTHER; note = 2'-O-methylguanosine-3'-phosphate
  modified_base 19: mod_base = OTHER; note = 2'-O-methyladenosine-3'-phosphate
  modified_base 20: mod_base = OTHER; note = 2'-O-methyluridine-3'-phosphate
  modified_base 21: mod_base = OTHER; note = 2'-O-methyluridine-3'-phosphorothioate
  modified_base 22: mod_base = OTHER; note = 2'-O-methyluridine-3'-phosphorothioate
  modified_base 23: mod_base = OTHER; note = 2'-O-methyladenosine-3'-phosphate
  misc_feature 1: note = RNA
  misc_feature 2: note = DNA
  misc_feature 3..4: note = RNA
  misc_feature 5: note = DNA
  misc_feature 6: note = RNA
  misc_feature 7: note = DNA
  misc_feature 8..11: note = RNA
  misc_feature 12: note = DNA
  misc_feature 13..23: note = RNA
taataacacctcttactgattta

SEQ ID NO: 1226 - DNA, 23 bp, synthetic construct
  source 1..23: mol_type = other DNA
  modified_base 1: mod_base = OTHER; note = Vinyl-phosphonate-2'-O-methyluridine-3'-phosphate
  modified_base 3: mod_base = OTHER; note = 2'-O-methylcytidine-3'-phosphate
  modified_base 4: mod_base = OTHER; note = 2'-O-methyladenosine-3'-phosphate
  modified_base 6: mod_base = OTHER; note = 2'-O-methyladenosine-3'-phosphate
  modified_base 8: mod_base = OTHER; note = 2'-O-methyladenosine-3'-phosphate
  modified_base 9: mod_base = OTHER; note = 2'-O-methyladenosine-3'-phosphate
  modified_base 10: mod_base = OTHER; note = 2'-O-methylcytidine-3'-phosphate
  modified_base 11: mod_base = OTHER; note = 2'-O-methyladenosine-3'-phosphate
  modified_base 13: mod_base = OTHER; note = 2'-O-methylcytidine-3'-phosphate
  modified_base 14: mod_base = OTHER; note = 2'-fluorouridine-3'-phosphate
  modified_base 15: mod_base = OTHER; note = 2'-O-methylcytidine-3'-phosphate
  modified_base 16: mod_base = OTHER; note = 2'-O-methyluridine-3'-phosphate
  modified_base 17: mod_base = OTHER; note = 2'-O-methyluridine-3'-phosphate
  modified_base 18: mod_base = OTHER; note = 2'-O-methyladenosine-3'-phosphate
  modified_base 19: mod_base = OTHER; note = 2'-O-methylcytidine-3'-phosphate
  modified_base 20: mod_base = OTHER; note = 2'-O-methyluridine-3'-phosphate
  modified_base 21: mod_base = OTHER; note = 2'-O-methylguanosine-3'-phosphorothioate
  modified_base 22: mod_base = OTHER; note = 2'-O-methyladenosine-3'-phosphorothioate
  modified_base 23: mod_base = OTHER; note = 2'-O-methyluridine-3'-phosphate
  misc_feature 1: note = RNA
  misc_feature 2: note = DNA
  misc_feature 3..4: note = RNA
  misc_feature 5: note = DNA
  misc_feature 6: note = RNA
  misc_feature 7: note = DNA
  misc_feature 8..11: note = RNA
  misc_feature 12: note = DNA
  misc_feature 13..23: note = RNA
tccaaataacacctcttactgat

SEQ ID NO: 1227 - DNA, 23 bp, synthetic construct
  source 1..23: mol_type = other DNA
  modified_base 1: mod_base = OTHER; note = Vinyl-phosphonate-2'-O-methyluridine-3'-phosphate
  modified_base 2: mod_base = OTHER; note = 2'-fluoroguanosine-3'-phosphate
  modified_base 3: mod_base = OTHER; note = 2'-O-methylguanosine-3'-phosphate
  modified_base 4: mod_base = OTHER; note = 2'-O-methyluridine-3'-phosphate
  modified_base 6: mod_base = OTHER; note = 2'-O-methylcytidine-3'-phosphate
  modified_base 7: mod_base = OTHER; note = cytidine-2'-phosphate
  modified_base 8: mod_base = OTHER; note = 2'-O-methyladenosine-3'-phosphate
  modified_base 9: mod_base = OTHER; note = 2'-O-methyluridine-3'-phosphate
  modified_base 10: mod_base = OTHER; note = 2'-O-methylguanosine-3'-phosphate
  modified_base 11: mod_base = OTHER; note = 2'-O-methylguanosine-3'-phosphate
  modified_base 12: mod_base = OTHER; note = 2'-O-methylcytidine-3'-phosphate
  modified_base 13: mod_base = OTHER; note = 2'-O-methylcytidine-3'-phosphate
  modified_base 14: mod_base = OTHER; note = 2'-fluoroadenosine-3'-phosphate
  modified_base 15: mod_base = OTHER; note = 2'-O-methyluridine-3'-phosphate
  modified_base 16: mod_base = OTHER; note = 2'-fluoroguanosine-3'-phosphate
  modified_base 17: mod_base = OTHER; note = 2'-O-methyluridine-3'-phosphate
  modified_base 18: mod_base = OTHER; note = 2'-O-methylcytidine-3'-phosphate
  modified_base 19: mod_base = OTHER; note = 2'-O-methylcytidine-3'-phosphate
  modified_base 20: mod_base = OTHER; note = 2'-O-methyladenosine-3'-phosphate
  modified_base 21: mod_base = OTHER; note = 2'-O-methyladenosine-3'-phosphorothioate
  modified_base 22: mod_base = OTHER; note = 2'-O-methylcytidine-3'-phosphorothioate
  modified_base 23: mod_base = OTHER; note = 2'-O-methyluridine-3'-phosphate
  misc_feature 1..4: note = RNA
  misc_feature 5: note = DNA
  misc_feature 6..23: note = RNA
tggttccatggccatgtccaact

SEQ ID NO: 1228 - DNA, 23 bp, synthetic construct
  source 1..23: mol_type = other DNA
  modified_base 1: mod_base = OTHER; note = Vinyl-phosphonate-2'-O-methyluridine-3'-phosphate
  modified_base 2: mod_base = OTHER; note = 2'-fluoroadenosine-3'-phosphate
  modified_base 3: mod_base = OTHER; note = 2'-O-methylguanosine-3'-phosphate
  modified_base 4: mod_base = OTHER; note = 2'-O-methyladenosine-3'-phosphate
  modified_base 6: mod_base = OTHER; note = 2'-O-methyluridine-3'-phosphate
  modified_base 7: mod_base = OTHER; note = guanosine-2'-phosphate
  modified_base 8: mod_base = OTHER; note = 2'-O-methylguanosine-3'-phosphate
  modified_base 9: mod_base = OTHER; note = 2'-O-methyladenosine-3'-phosphate
  modified_base 10: mod_base = OTHER; note = 2'-O-methyluridine-3'-phosphate
  modified_base 11: mod_base = OTHER; note = 2'-O-methyluridine-3'-phosphate
  modified_base 12: mod_base = OTHER; note = 2'-O-methylcytidine-3'-phosphate
  modified_base 13: mod_base = OTHER; note = 2'-O-methylcytidine-3'-phosphate
  modified_base 14: mod_base = OTHER; note = 2'-fluoroadenosine-3'-phosphate
  modified_base 15: mod_base = OTHER; note = 2'-O-methylguanosine-3'-phosphate
  modified_base 16: mod_base = OTHER; note = 2'-fluoroadenosine-3'-phosphate
  modified_base 17: mod_base = OTHER; note = 2'-O-methylguanosine-3'-phosphate
  modified_base 18: mod_base = OTHER; note = 2'-O-methyluridine-3'-phosphate
  modified_base 19: mod_base = OTHER; note = 2'-O-methylcytidine-3'-phosphate
  modified_base 20: mod_base = OTHER; note = 2'-O-methylcytidine-3'-phosphate
  modified_base 21: mod_base = OTHER; note = 2'-O-methyladenosine-3'-phosphorothioate
  modified_base 22: mod_base = OTHER; note = 2'-O-methylguanosine-3'-phosphorothioate
  modified_base 23: mod_base = OTHER; note = 2'-O-methylguanosine-3'-phosphate
  misc_feature 1..4: note = RNA
  misc_feature 5: note = DNA
  misc_feature 6..23: note = RNA
tagaatggattccagagtccagg

SEQ ID NO: 1229 - DNA, 23 bp, synthetic construct
  source 1..23: mol_type = other DNA
  modified_base 1: mod_base = OTHER; note = Vinyl-phosphonate-2'-O-methyluridine-3'-phosphate
  modified_base 2: mod_base = OTHER; note = 2'-fluoroadenosine-3'-phosphate
  modified_base 3: mod_base = OTHER; note = 2'-O-methyluridine-3'-phosphate
  modified_base 4: mod_base = OTHER; note = 2'-O-methyluridine-3'-phosphate
  modified_base 6: mod_base = OTHER; note = 2'-O-methylcytidine-3'-phosphate
  modified_base 7: mod_base = OTHER; note = cytidine-2'-phosphate
  modified_base 8: mod_base = OTHER; note = 2'-O-methyluridine-3'-phosphate
  modified_base 9: mod_base = OTHER; note = 2'-O-methyluridine-3'-phosphate
  modified_base 10: mod_base = OTHER; note = 2'-O-methyluridine-3'-phosphate
  modified_base 11: mod_base = OTHER; note = 2'-O-methyladenosine-3'-phosphate
  modified_base 12: mod_base = OTHER; note = 2'-O-methylcytidine-3'-phosphate
  modified_base 13: mod_base = OTHER; note = 2'-O-methylcytidine-3'-phosphate
  modified_base 14: mod_base = OTHER; note = 2'-fluoroadenosine-3'-phosphate
  modified_base 15: mod_base = OTHER; note = 2'-O-methylcytidine-3'-phosphate
  modified_base 16: mod_base = OTHER; note = 2'-fluorouridine-3'-phosphate
  modified_base 17: mod_base = OTHER; note = 2'-O-methylcytidine-3'-phosphate
  modified_base 18: mod_base = OTHER; note = 2'-O-methyladenosine-3'-phosphate
  modified_base 19: mod_base = OTHER; note = 2'-O-methylguanosine-3'-phosphate
  modified_base 20: mod_base = OTHER; note = 2'-O-methyladenosine-3'-phosphate
  modified_base 21: mod_base = OTHER; note = 2'-O-methylguanosine-3'-phosphorothioate
  modified_base 22: mod_base = OTHER; note = 2'-O-methyladenosine-3'-phosphorothioate
  modified_base 23: mod_base = OTHER; note = 2'-O-methyladenosine-3'-phosphate
  misc_feature 1..4: note = RNA
  misc_feature 5: note = DNA
  misc_feature 6..23: note = RNA
tattgcctttaccactcagagaa

SEQ ID NO: 1230 - DNA, 23 bp, synthetic construct
  source 1..23: mol_type = other DNA
  modified_base 1: mod_base = OTHER; note = Vinyl-phosphonate-2'-O-methyluridine-3'-phosphate
  modified_base 2: mod_base = OTHER; note = 2'-fluorouridine-3'-phosphate
  modified_base 3: mod_base = OTHER; note = 2'-O-methyladenosine-3'-phosphate
  modified_base 4: mod_base = OTHER; note = 2'-O-methyluridine-3'-phosphate
  modified_base 6: mod_base = OTHER; note = 2'-O-methyladenosine-3'-phosphate
  modified_base 7: mod_base = OTHER; note = guanosine-2'-phosphate
  modified_base 8: mod_base = OTHER; note = 2'-O-methylcytidine-3'-phosphate
  modified_base 9: mod_base = OTHER; note = 2'-O-methyluridine-3'-phosphate
  modified_base 10: mod_base = OTHER; note = 2'-O-methyladenosine-3'-phosphate
  modified_base 11: mod_base = OTHER; note = 2'-O-methylcytidine-3'-phosphate
  modified_base 12: mod_base = OTHER; note = 2'-O-methyluridine-3'-phosphate
  modified_base 13: mod_base = OTHER; note = 2'-O-methyluridine-3'-phosphate
  modified_base 14: mod_base = OTHER; note = 2'-fluoroguanosine-3'-phosphate
  modified_base 15: mod_base = OTHER; note = 2'-O-methyluridine-3'-phosphate
  modified_base 16: mod_base = OTHER; note = 2'-fluorouridine-3'-phosphate
  modified_base 17: mod_base = OTHER; note = 2'-O-methylcytidine-3'-phosphate
  modified_base 18: mod_base = OTHER; note = 2'-O-methyluridine-3'-phosphate
  modified_base 19: mod_base = OTHER; note = 2'-O-methyluridine-3'-phosphate
  modified_base 20: mod_base = OTHER; note = 2'-O-methylguanosine-3'-phosphate
  modified_base 21: mod_base = OTHER; note = 2'-O-methyladenosine-3'-phosphorothioate
  modified_base 22: mod_base = OTHER; note = 2'-O-methylguanosine-3'-phosphorothioate
  modified_base 23: mod_base = OTHER; note = 2'-O-methyluridine-3'-phosphate
  misc_feature 1..4: note = RNA
  misc_feature 5: note = DNA
  misc_feature 6..23: note = RNA
ttatcagctacttgttcttgagt

SEQ ID NO: 1231 - DNA, 23 bp, synthetic construct
  source 1..23: mol_type = other DNA
  modified_base 1: mod_base = OTHER; note = Vinyl-phosphonate-2'-O-methyluridine-3'-phosphate
  modified_base 2: mod_base = OTHER; note = 2'-fluorocytidine-3'-phosphate
  modified_base 3: mod_base = OTHER; note = 2'-O-methyluridine-3'-phosphate
  modified_base 4: mod_base = OTHER; note = 2'-O-methylguanosine-3'-phosphate
  modified_base 6: mod_base = OTHER; note = 2'-O-methylcytidine-3'-phosphate
  modified_base 7: mod_base = OTHER; note = cytidine-2'-phosphate
  modified_base 8: mod_base = OTHER; note = 2'-O-methyladenosine-3'-phosphate
  modified_base 9: mod_base = OTHER; note = 2'-O-methyluridine-3'-phosphate
  modified_base 10: mod_base = OTHER; note = 2'-O-methylcytidine-3'-phosphate
  modified_base 11: mod_base = OTHER; note = 2'-O-methyladenosine-3'-phosphate
  modified_base 12: mod_base = OTHER; note = 2'-O-methyladenosine-3'-phosphate
  modified_base 13: mod_base = OTHER; note = 2'-O-methyluridine-3'-phosphate
  modified_base 14: mod_base = OTHER; note = 2'-fluoroadenosine-3'-phosphate
  modified_base 15: mod_base = OTHER; note = 2'-O-methyluridine-3'-phosphate
  modified_base 16: mod_base = OTHER; note = 2'-fluorocytidine-3'-phosphate
  modified_base 17: mod_base = OTHER; note = 2'-O-methyladenosine-3'-phosphate
  modified_base 18: mod_base = OTHER; note = 2'-O-methylguanosine-3'-phosphate
  modified_base 19: mod_base = OTHER; note = 2'-O-methylcytidine-3'-phosphate
  modified_base 20: mod_base = OTHER; note = 2'-O-methyluridine-3'-phosphate
  modified_base 21: mod_base = OTHER; note = 2'-O-methyladenosine-3'-phosphorothioate
  modified_base 22: mod_base = OTHER; note = 2'-O-methylcytidine-3'-phosphorothioate
  modified_base 23: mod_base = OTHER; note = 2'-O-methyluridine-3'-phosphate
  misc_feature 1..4: note = RNA
  misc_feature 5: note = DNA
  misc_feature 6..23: note = RNA
tctgtccatcaatatcagctact

SEQ ID NO: 1232 - DNA, 23 bp, synthetic construct
  source 1..23: mol_type = other DNA
  modified_base 1: mod_base = OTHER; note = Vinyl-phosphonate-2'-O-methyluridine-3'-phosphate
  modified_base 2: mod_base = OTHER; note = 2'-fluoroadenosine-3'-phosphate
  modified_base 3: mod_base = OTHER; note = 2'-O-methylcytidine-3'-phosphate
  modified_base 4: mod_base = OTHER; note = 2'-O-methyluridine-3'-phosphate
  modified_base 6: mod_base = OTHER; note = 2'-O-methyluridine-3'-phosphate
  modified_base 7: mod_base = OTHER; note = cytidine-2'-phosphate
  modified_base 8: mod_base = OTHER; note = 2'-O-methylcytidine-3'-phosphate
  modified_base 9: mod_base = OTHER; note = 2'-O-methyladenosine-3'-phosphate
  modified_base 10: mod_base = OTHER; note = 2'-O-methyluridine-3'-phosphate
  modified_base 11: mod_base = OTHER; note = 2'-O-methylcytidine-3'-phosphate
  modified_base 12: mod_base = OTHER; note = 2'-O-methyladenosine-3'-phosphate
  modified_base 13: mod_base = OTHER; note = 2'-O-methyladenosine-3'-phosphate
  modified_base 14: mod_base = OTHER; note = 2'-fluorouridine-3'-phosphate
  modified_base 15: mod_base = OTHER; note = 2'-O-methyladenosine-3'-phosphate
  modified_base 16: mod_base = OTHER; note = 2'-fluorouridine-3'-phosphate
  modified_base 17: mod_base = OTHER; note = 2'-O-methylcytidine-3'-phosphate
  modified_base 18: mod_base = OTHER; note = 2'-O-methyladenosine-3'-phosphate
  modified_base 19: mod_base = OTHER; note = 2'-O-methylguanosine-3'-phosphate
  modified_base 20: mod_base = OTHER; note = 2'-O-methylcytidine-3'-phosphate
  modified_base 21: mod_base = OTHER; note = 2'-O-methyluridine-3'-phosphorothioate
  modified_base 22: mod_base = OTHER; note = 2'-O-methyladenosine-3'-phosphorothioate
  modified_base 23: mod_base = OTHER; note = 2'-O-methylcytidine-3'-phosphate
  misc_feature 1..4: note = RNA
  misc_feature 5: note = DNA
  misc_feature 6..23: note = RNA
tactgtccatcaatatcagctac

SEQ ID NO: 1233 - DNA, 23 bp, synthetic construct
  source 1..23: mol_type = other DNA
  modified_base 1: mod_base = OTHER; note = Vinyl-phosphonate-2'-O-methyluridine-3'-phosphate
  modified_base 2: mod_base = OTHER; note = 2'-fluoroadenosine-3'-phosphate
  modified_base 3: mod_base = OTHER; note = 2'-O-methyluridine-3'-phosphate
  modified_base 4: mod_base = OTHER; note = 2'-O-methyladenosine-3'-phosphate
  modified_base 6: mod_base = OTHER; note = 2'-O-methyluridine-3'-phosphate
  modified_base 7: mod_base = OTHER; note = guanosine-2'-phosphate
  modified_base 8: mod_base = OTHER; note = 2'-O-methyluridine-3'-phosphate
  modified_base 9: mod_base = OTHER; note = 2'-O-methylcytidine-3'-phosphate
  modified_base 10: mod_base = OTHER; note = 2'-O-methylcytidine-3'-phosphate
  modified_base 11: mod_base = OTHER; note = 2'-O-methyladenosine-3'-phosphate
  modified_base 12: mod_base = OTHER; note = 2'-O-methyluridine-3'-phosphate
  modified_base 13: mod_base = OTHER; note = 2'-O-methylcytidine-3'-phosphate
  modified_base 14: mod_base = OTHER; note = 2'-fluoroadenosine-3'-phosphate
  modified_base 15: mod_base = OTHER; note = 2'-O-methyladenosine-3'-phosphate
  modified_base 16: mod_base = OTHER; note = 2'-fluorouridine-3'-phosphate
  modified_base 17: mod_base = OTHER; note = 2'-O-methyladenosine-3'-phosphate
  modified_base 18: mod_base = OTHER; note = 2'-O-methyluridine-3'-phosphate
  modified_base 19: mod_base = OTHER; note = 2'-O-methylcytidine-3'-phosphate
  modified_base 20: mod_base = OTHER; note = 2'-O-methyladenosine-3'-phosphate
  modified_base 21: mod_base = OTHER; note = 2'-O-methylguanosine-3'-phosphorothioate
  modified_base 22: mod_base = OTHER; note = 2'-O-methylcytidine-3'-phosphorothioate
  modified_base 23: mod_base = OTHER; note = 2'-O-methyluridine-3'-phosphate
  misc_feature 1..4: note = RNA
  misc_feature 5: note = DNA
  misc_feature 6..23: note = RNA
tatactgtccatcaatatcagct

SEQ ID NO: 1234 - DNA, 23 bp, synthetic construct
  source 1..23: mol_type = other DNA
  modified_base 1: mod_base = OTHER; note = Vinyl-phosphonate-2'-O-methyluridine-3'-phosphate
  modified_base 2: mod_base = OTHER; note = 2'-fluorouridine-3'-phosphate
  modified_base 3: mod_base = OTHER; note = 2'-O-methylcytidine-3'-phosphate
  modified_base 4: mod_base = OTHER; note = 2'-O-methyladenosine-3'-phosphate
  modified_base 6: mod_base = OTHER; note = 2'-O-methyluridine-3'-phosphate
  modified_base 7: mod_base = OTHER; note = guanosine-2'-phosphate
  modified_base 8: mod_base = OTHER; note = 2'-O-methylcytidine-3'-phosphate
  modified_base 9: mod_base = OTHER; note = 2'-O-methyladenosine-3'-phosphate
  modified_base 10: mod_base = OTHER; note = 2'-O-methyluridine-3'-phosphate
  modified_base 11: mod_base = OTHER; note = 2'-O-methyladenosine-3'-phosphate
  modified_base 12: mod_base = OTHER; note = 2'-O-methylcytidine-3'-phosphate
  modified_base 13: mod_base = OTHER; note = 2'-O-methyluridine-3'-phosphate
  modified_base 14: mod_base = OTHER; note = 2'-fluoroguanosine-3'-phosphate
  modified_base 15: mod_base = OTHER; note = 2'-O-methyluridine-3'-phosphate
  modified_base 16: mod_base = OTHER; note = 2'-fluorocytidine-3'-phosphate
  modified_base 17: mod_base = OTHER; note = 2'-O-methylcytidine-3'-phosphate
  modified_base 18: mod_base = OTHER; note = 2'-O-methyladenosine-3'-phosphate
  modified_base 19: mod_base = OTHER; note = 2'-O-methyluridine-3'-phosphate
  modified_base 20: mod_base = OTHER; note = 2'-O-methylcytidine-3'-phosphate
  modified_base 21: mod_base = OTHER; note = 2'-O-methyladenosine-3'-phosphorothioate
  modified_base 22: mod_base = OTHER; note = 2'-O-methyladenosine-3'-phosphorothioate
  modified_base 23: mod_base = OTHER; note = 2'-O-methyluridine-3'-phosphate
  misc_feature 1..4: note = RNA
  misc_feature 5: note = DNA
  misc_feature 6..23: note = RNA
ttcattgcatactgtccatcaat

SEQ ID NO: 1235 - DNA, 23 bp, synthetic construct
  source 1..23: mol_type = other DNA
  modified_base 1: mod_base = OTHER; note = Vinyl-phosphonate-2'-O-methyluridine-3'-phosphate
  modified_base 2: mod_base = OTHER; note = 2'-fluoroadenosine-3'-phosphate
  modified_base 3: mod_base = OTHER; note = 2'-O-methylguanosine-3'-phosphate
  modified_base 4: mod_base = OTHER; note = 2'-O-methylcytidine-3'-phosphate
  modified_base 6: mod_base = OTHER; note = 2'-O-methylcytidine-3'-phosphate
  modified_base 7: mod_base = OTHER; note = guanosine-2'-phosphate
  modified_base 8: mod_base = OTHER; note = 2'-O-methyladenosine-3'-phosphate
  modified_base 9: mod_base = OTHER; note = 2'-O-methylguanosine-3'-phosphate
  modified_base 10: mod_base = OTHER; note = 2'-O-methyluridine-3'-phosphate
  modified_base 11: mod_base = OTHER; note = 2'-O-methylcytidine-3'-phosphate
  modified_base 12: mod_base = OTHER; note = 2'-O-methyladenosine-3'-phosphate
  modified_base 13: mod_base = OTHER; note = 2'-O-methyluridine-3'-phosphate
  modified_base 14: mod_base = OTHER; note = 2'-fluorouridine-3'-phosphate
  modified_base 15: mod_base = OTHER; note = 2'-O-methylguanosine-3'-phosphate
  modified_base 16: mod_base = OTHER; note = 2'-fluorocytidine-3'-phosphate
  modified_base 17: mod_base = OTHER; note = 2'-O-methyladenosine-3'-phosphate
  modified_base 18: mod_base = OTHER; note = 2'-O-methyluridine-3'-phosphate
  modified_base 19: mod_base = OTHER; note = 2'-O-methyladenosine-3'-phosphate
  modified_base 20: mod_base = OTHER; note = 2'-O-methylcytidine-3'-phosphate
  modified_base 21: mod_base = OTHER; note = 2'-O-methyluridine-3'-phosphorothioate
  modified_base 22: mod_base = OTHER; note = 2'-O-methylguanosine-3'-phosphorothioate
  modified_base 23: mod_base = OTHER; note = 2'-O-methyluridine-3'-phosphate
  misc_feature 1..4: note = RNA
  misc_feature 5: note = DNA
  misc_feature 6..23: note = RNA
tagctcgagtcattgcatactgt

SEQ ID NO: 1236 - DNA, 23 bp, synthetic construct
  source 1..23: mol_type = other DNA
  modified_base 1: mod_base = OTHER; note = Vinyl-phosphonate-2'-O-methyluridine-3'-phosphate
  modified_base 2: mod_base = OTHER; note = 2'-fluorocytidine-3'-phosphate
  modified_base 3: mod_base = OTHER; note = 2'-O-methyladenosine-3'-phosphate
  modified_base 4: mod_base = OTHER; note = 2'-O-methylguanosine-3'-phosphate
  modified_base 6: mod_base = OTHER; note = 2'-O-methyluridine-3'-phosphate
  modified_base 7: mod_base = OTHER; note = cytidine-2'-phosphate
  modified_base 8: mod_base = OTHER; note = 2'-O-methylguanosine-3'-phosphate
  modified_base 9: mod_base = OTHER; note = 2'-O-methyluridine-3'-phosphate
  modified_base 10: mod_base = OTHER; note = 2'-O-methyladenosine-3'-phosphate
  modified_base 11: mod_base = OTHER; note = 2'-O-methylcytidine-3'-phosphate
  modified_base 12: mod_base = OTHER; note = 2'-O-methylcytidine-3'-phosphate
  modified_base 13: mod_base = OTHER; note = 2'-O-methylcytidine-3'-phosphate
  modified_base 14: mod_base = OTHER; note = 2'-fluorouridine-3'-phosphate
  modified_base 15: mod_base = OTHER; note = 2'-O-methylcytidine-3'-phosphate
  modified_base 16: mod_base = OTHER; note = 2'-fluorouridine-3'-phosphate
  modified_base 17: mod_base = OTHER; note = 2'-O-methylguanosine-3'-phosphate
  modified_base 18: mod_base = OTHER; note = 2'-O-methyladenosine-3'-phosphate
  modified_base 19: mod_base = OTHER; note = 2'-O-methylguanosine-3'-phosphate
  modified_base 20: mod_base = OTHER; note = 2'-O-methylcytidine-3'-phosphate
  modified_base 21: mod_base = OTHER; note = 2'-O-methyluridine-3'-phosphorothioate
  modified_base 22: mod_base = OTHER; note = 2'-O-methylcytidine-3'-phosphorothioate
  modified_base 23: mod_base = OTHER; note = 2'-O-methylguanosine-3'-phosphate
  misc_feature 1..4: note = RNA
  misc_feature 5: note = DNA
  misc_feature 6..23: note = RNA
tcagctcgtaccctctgagctcg

SEQ ID NO: 1237 - DNA, 23 bp, synthetic construct
  source 1..23: mol_type = other DNA
  modified_base 1: mod_base = OTHER; note = Vinyl-phosphonate-2'-O-methyluridine-3'-phosphate
  modified_base 2: mod_base = OTHER; note = 2'-fluoroadenosine-3'-phosphate
  modified_base 3: mod_base = OTHER; note = 2'-O-methylguanosine-3'-phosphate
  modified_base 4: mod_base = OTHER; note = 2'-O-methylcytidine-3'-phosphate
  modified_base 6: mod_base = OTHER; note = 2'-O-methylguanosine-3'-phosphate
  modified_base 7: mod_base = OTHER; note = cytidine-2'-phosphate
  modified_base 8: mod_base = OTHER; note = 2'-O-methyluridine-3'-phosphate
  modified_base 9: mod_base = OTHER; note = 2'-O-methylcytidine-3'-phosphate
  modified_base 10: mod_base = OTHER; note = 2'-O-methylguanosine-3'-phosphate
  modified_base 11: mod_base = OTHER; note = 2'-O-methyluridine-3'-phosphate
  modified_base 12: mod_base = OTHER; note = 2'-O-methyladenosine-3'-phosphate
  modified_base 13: mod_base = OTHER; note = 2'-O-methylcytidine-3'-phosphate
  modified_base 14: mod_base = OTHER; note = 2'-fluorocytidine-3'-phosphate
  modified_base 15: mod_base = OTHER; note = 2'-O-methylcytidine-3'-phosphate
  modified_base 16: mod_base = OTHER; note = 2'-fluorouridine-3'-phosphate
  modified_base 17: mod_base = OTHER; note = 2'-O-methylcytidine-3'-phosphate
  modified_base 18: mod_base = OTHER; note = 2'-O-methyluridine-3'-phosphate
  modified_base 19: mod_base = OTHER; note = 2'-O-methylguanosine-3'-phosphate
  modified_base 20: mod_base = OTHER; note = 2'-O-methyladenosine-3'-phosphate
  modified_base 21: mod_base = OTHER; note = 2'-O-methylguanosine-3'-phosphorothioate
  modified_base 22: mod_base = OTHER; note = 2'-O-methylcytidine-3'-phosphorothioate
  modified_base 23: mod_base = OTHER; note = 2'-O-methyluridine-3'-phosphate
  misc_feature 1..4: note = RNA
  misc_feature 5: note = DNA
  misc_feature 6..23: note = RNA
tagcagctcgtaccctctgagct

SEQ ID NO: 1238 - DNA, 23 bp, synthetic construct
  source 1..23: mol_type = other DNA
  modified_base 1: mod_base = OTHER; note = Vinyl-phosphonate-2'-O-methyluridine-3'-phosphate
  modified_base 2: mod_base = OTHER; note = 2'-fluorocytidine-3'-phosphate
  modified_base 3: mod_base = OTHER; note = 2'-O-methyladenosine-3'-phosphate
  modified_base 4: mod_base = OTHER; note = 2'-O-methyluridine-3'-phosphate
  modified_base 6: mod_base = OTHER; note = 2'-O-methylguanosine-3'-phosphate
  modified_base 7: mod_base = OTHER; note = cytidine-2'-phosphate
  modified_base 8: mod_base = OTHER; note = 2'-O-methyladenosine-3'-phosphate
  modified_base 9: mod_base = OTHER; note = 2'-O-methylguanosine-3'-phosphate
  modified_base 10: mod_base = OTHER; note = 2'-O-methylcytidine-3'-phosphate
  modified_base 11: mod_base = OTHER; note = 2'-O-methyluridine-3'-phosphate
  modified_base 12: mod_base = OTHER; note = 2'-O-methylcytidine-3'-phosphate
  modified_base 13: mod_base = OTHER; note = 2'-O-methylguanosine-3'-phosphate
  modified_base 14: mod_base = OTHER; note = 2'-fluorouridine-3'-phosphate
  modified_base 15: mod_base = OTHER; note = 2'-O-methyladenosine-3'-phosphate
  modified_base 16: mod_base = OTHER; note = 2'-fluorocytidine-3'-phosphate
  modified_base 17: mod_base = OTHER; note = 2'-O-methylcytidine-3'-phosphate
  modified_base 18: mod_base = OTHER; note = 2'-O-methylcytidine-3'-phosphate
  modified_base 19: mod_base = OTHER; note = 2'-O-methyluridine-3'-phosphate
  modified_base 20: mod_base = OTHER; note = 2'-O-methylcytidine-3'-phosphate
  modified_base 21: mod_base = OTHER; note = 2'-O-methyluridine-3'-phosphorothioate
  modified_base 22: mod_base = OTHER; note = 2'-O-methylguanosine-3'-phosphorothioate
  modified_base 23: mod_base = OTHER; note = 2'-O-methyladenosine-3'-phosphate
  misc_feature 1..4: note = RNA
  misc_feature 5: note = DNA
  misc_feature 6..23: note = RNA
tcatagcagctcgtaccctctga

SEQ ID NO: 1239 - DNA, 23 bp, synthetic construct
  source 1..23: mol_type = other DNA
  modified_base 1: mod_base = OTHER; note = Vinyl-phosphonate-2'-O-methyluridine-3'-phosphate
  modified_base 2: mod_base = OTHER; note = 2'-fluoroadenosine-3'-phosphate
  modified_base 3: mod_base = OTHER; note = 2'-O-methyladenosine-3'-phosphate
  modified_base 4: mod_base = OTHER; note = 2'-O-methyluridine-3'-phosphate
  modified_base 6: mod_base = OTHER; note = 2'-O-methyluridine-3'-phosphate
  modified_base 7: mod_base = OTHER; note = cytidine-2'-phosphate
  modified_base 8: mod_base = OTHER; note = 2'-O-methyluridine-3'-phosphate
  modified_base 9: mod_base = OTHER; note = 2'-O-methylcytidine-3'-phosphate
  modified_base 10: mod_base = OTHER; note = 2'-O-methyladenosine-3'-phosphate
  modified_base 11: mod_base = OTHER; note = 2'-O-methylguanosine-3'-phosphate
  modified_base 12: mod_base = OTHER; note = 2'-O-methylguanosine-3'-phosphate
  modified_base 13: mod_base = OTHER; note = 2'-O-methylguanosine-3'-phosphate
  modified_base 14: mod_base = OTHER; note = 2'-fluoroadenosine-3'-phosphate
  modified_base 15: mod_base = OTHER; note = 2'-O-methyladenosine-3'-phosphate
  modified_base 16: mod_base = OTHER; note = 2'-fluorocytidine-3'-phosphate
  modified_base 17: mod_base = OTHER; note = 2'-O-methyladenosine-3'-phosphate
  modified_base 18: mod_base = OTHER; note = 2'-O-methyluridine-3'-phosphate
  modified_base 19: mod_base = OTHER; note = 2'-O-methyladenosine-3'-phosphate
  modified_base 20: mod_base = OTHER; note = 2'-O-methylguanosine-3'-phosphate
  modified_base 21: mod_base = OTHER; note = 2'-O-methylcytidine-3'-phosphorothioate
  modified_base 22: mod_base = OTHER; note = 2'-O-methyladenosine-3'-phosphorothioate
  modified_base 23: mod_base = OTHER; note = 2'-O-methylguanosine-3'-phosphate
  misc_feature 1..4: note = RNA
  misc_feature 5: note = DNA
  misc_feature 6..23: note = RNA
taatgtctcagggaacatagcag

SEQ ID NO: 1240 - DNA, 23 bp, synthetic construct
  source 1..23: mol_type = other DNA
  modified_base 1: mod_base = OTHER; note = Vinyl-phosphonate-2'-O-methyluridine-3'-phosphate
  modified_base 2: mod_base = OTHER; note = 2'-fluorouridine-3'-phosphate
  modified_base 3: mod_base = OTHER; note = 2'-O-methylguanosine-3'-phosphate
  modified_base 4: mod_base = OTHER; note = 2'-O-methyladenosine-3'-phosphate
  modified_base 6: mod_base = OTHER; note = 2'-O-methylguanosine-3'-phosphate
  modified_base 7: mod_base = OTHER; note = guanosine-2'-phosphate
  modified_base 8: mod_base = OTHER; note = 2'-O-methyluridine-3'-phosphate
  modified_base 9: mod_base = OTHER; note = 2'-O-methyluridine-3'-phosphate
  modified_base 10: mod_base = OTHER; note = 2'-O-methylcytidine-3'-phosphate
  modified_base 11: mod_base = OTHER; note = 2'-O-methyladenosine-3'-phosphate
  modified_base 12: mod_base = OTHER; note = 2'-O-methylguanosine-3'-phosphate
  modified_base 13: mod_base = OTHER; note = 2'-O-methylcytidine-3'-phosphate
  modified_base 14: mod_base = OTHER; note = 2'-fluorocytidine-3'-phosphate
  modified_base 15: mod_base = OTHER; note = 2'-O-methyladenosine-3'-phosphate
  modified_base 16: mod_base = OTHER; note = 2'-fluoroadenosine-3'-phosphate
  modified_base 17: mod_base = OTHER; note = 2'-O-methyladenosine-3'-phosphate
  modified_base 18: mod_base = OTHER; note = 2'-O-methylcytidine-3'-phosphate
  modified_base 19: mod_base = OTHER; note = 2'-O-methylguanosine-3'-phosphate
  modified_base 20: mod_base = OTHER; note = 2'-O-methylcytidine-3'-phosphate
  modified_base 21: mod_base = OTHER; note = 2'-O-methyluridine-3'-phosphorothioate
  modified_base 22: mod_base = OTHER; note = 2'-O-methylguanosine-3'-phosphorothioate
  modified_base 23: mod_base = OTHER; note = 2'-O-methylguanosine-3'-phosphate
  misc_feature 1..4: note = RNA
  misc_feature 5: note = DNA
  misc_feature 6..23: note = RNA
ttgatggttcagccaaacgctgg

SEQ ID NO: 1241 - DNA, 23 bp, synthetic construct
  source 1..23: mol_type = other DNA
  modified_base 1: mod_base = OTHER; note = Vinyl-phosphonate-2'-O-methyluridine-3'-phosphate
  modified_base 2: mod_base = OTHER; note = 2'-fluorouridine-3'-phosphate
  modified_base 3: mod_base = OTHER; note = 2'-O-methyladenosine-3'-phosphate
  modified_base 4: mod_base = OTHER; note = 2'-O-methylcytidine-3'-phosphate
  modified_base 6: mod_base = OTHER; note = 2'-O-methyladenosine-3'-phosphate
  modified_base 7: mod_base = OTHER; note = cytidine-2'-phosphate
  modified_base 8: mod_base = OTHER; note = 2'-O-methyluridine-3'-phosphate
  modified_base 9: mod_base = OTHER; note = 2'-O-methylguanosine-3'-phosphate
  modified_base 10: mod_base = OTHER; note = 2'-O-methylcytidine-3'-phosphate
  modified_base 11: mod_base = OTHER; note = 2'-O-methyladenosine-3'-phosphate
  modified_base 12: mod_base = OTHER; note = 2'-O-methyluridine-3'-phosphate
  modified_base 13: mod_base = OTHER; note = 2'-O-methylguanosine-3'-phosphate
  modified_base 14: mod_base = OTHER; note = 2'-fluorouridine-3'-phosphate
  modified_base 15: mod_base = OTHER; note = 2'-O-methyluridine-3'-phosphate
  modified_base 16: mod_base = OTHER; note = 2'-fluorouridine-3'-phosphate
  modified_base 17: mod_base = OTHER; note = 2'-O-methylcytidine-3'-phosphate
  modified_base 18: mod_base = OTHER; note = 2'-O-methyladenosine-3'-phosphate
  modified_base 19: mod_base = OTHER; note = 2'-O-methylguanosine-3'-phosphate
  modified_base 20: mod_base = OTHER; note = 2'-O-methylcytidine-3'-phosphate
  modified_base 21: mod_base = OTHER; note = 2'-O-methyladenosine-3'-phosphorothioate
  modified_base 22: mod_base = OTHER; note = 2'-O-methyluridine-3'-phosphorothioate
  modified_base 23: mod_base = OTHER; note = 2'-O-methylcytidine-3'-phosphate
  misc_feature 1..4: note = RNA
  misc_feature 5: note = DNA
  misc_feature 6..23: note = RNA
ttacaactgcatgtttcagcatc

SEQ ID NO: 1242 - DNA, 23 bp, synthetic construct
  source 1..23: mol_type = other DNA
  modified_base 1: mod_base = OTHER; note = Vinyl-phosphonate-2'-O-methyluridine-3'-phosphate
  modified_base 2: mod_base = OTHER; note = 2'-fluoroadenosine-3'-phosphate
  modified_base 3: mod_base = OTHER; note = 2'-O-methyluridine-3'-phosphate
  modified_base 4: mod_base = OTHER; note = 2'-O-methylcytidine-3'-phosphate
  modified_base 6: mod_base = OTHER; note = 2'-O-methyladenosine-3'-phosphate
  modified_base 7: mod_base = OTHER; note = guanosine-2'-phosphate
  modified_base 8: mod_base = OTHER; note = 2'-O-methyluridine-3'-phosphate
  modified_base 9: mod_base = OTHER; note = 2'-O-methyluridine-3'-phosphate
  modified_base 10: mod_base = OTHER; note = 2'-O-methyluridine-3'-phosphate
  modified_base 11: mod_base = OTHER; note = 2'-O-methyladenosine-3'-phosphate
  modified_base 12: mod_base = OTHER; note = 2'-O-methylcytidine-3'-phosphate
  modified_base 13: mod_base = OTHER; note = 2'-O-methyladenosine-3'-phosphate
  modified_base 14: mod_base = OTHER; note = 2'-fluoroadenosine-3'-phosphate
  modified_base 15: mod_base = OTHER; note = 2'-O-methylcytidine-3'-phosphate
  modified_base 16: mod_base = OTHER; note = 2'-fluorouridine-3'-phosphate
  modified_base 17: mod_base = OTHER; note = 2'-O-methylguanosine-3'-phosphate
  modified_base 18: mod_base = OTHER; note = 2'-O-methylcytidine-3'-phosphate
  modified_base 19: mod_base = OTHER; note = 2'-O-methyladenosine-3'-phosphate
  modified_base 20: mod_base = OTHER; note = 2'-O-methyluridine-3'-phosphate
  modified_base 21: mod_base = OTHER; note = 2'-O-methylguanosine-3'-phosphorothioate
  modified_base 22: mod_base = OTHER; note = 2'-O-methyluridine-3'-phosphorothioate
  modified_base 23: mod_base = OTHER; note = 2'-O-methyluridine-3'-phosphate
  misc_feature 1..4: note = RNA
  misc_feature 5: note = DNA
  misc_feature 6..23: note = RNA
tatcaagtttacaactgcatgtt

SEQ ID NO: 1243 - DNA, 23 bp, synthetic construct
  source 1..23: mol_type = other DNA
  modified_base 1: mod_base = OTHER; note = Vinyl-phosphonate-2'-O-methyluridine-3'-phosphate
  modified_base 2: mod_base = OTHER; note = 2'-fluorouridine-3'-phosphate
  modified_base 3: mod_base = OTHER; note = 2'-O-methyluridine-3'-phosphate
  modified_base 4: mod_base = OTHER; note = 2'-O-methyladenosine-3'-phosphate
  modified_base 6: mod_base = OTHER; note = 2'-O-methyluridine-3'-phosphate
  modified_base 7: mod_base = OTHER; note = cytidine-2'-phosphate
  modified_base 8: mod_base = OTHER; note = 2'-O-methyladenosine-3'-phosphate
  modified_base 9: mod_base = OTHER; note = 2'-O-methyladenosine-3'-phosphate
  modified_base 10: mod_base = OTHER; note = 2'-O-methylguanosine-3'-phosphate
  modified_base 11: mod_base = OTHER; note = 2'-O-methyluridine-3'-phosphate
  modified_base 12: mod_base = OTHER; note = 2'-O-methyluridine-3'-phosphate
  modified_base 13: mod_base = OTHER; note = 2'-O-methyluridine-3'-phosphate
  modified_base 14: mod_base = OTHER; note = 2'-fluoroadenosine-3'-phosphate
  modified_base 15: mod_base = OTHER; note = 2'-O-methylcytidine-3'-phosphate
  modified_base 16: mod_base = OTHER; note = 2'-fluoroadenosine-3'-phosphate
  modified_base 17: mod_base = OTHER; note = 2'-O-methyladenosine-3'-phosphate
  modified_base 18: mod_base = OTHER; note = 2'-O-methylcytidine-3'-phosphate
  modified_base 19: mod_base = OTHER; note = 2'-O-methyluridine-3'-phosphate
  modified_base 20: mod_base = OTHER; note = 2'-O-methylguanosine-3'-phosphate
  modified_base 21: mod_base = OTHER; note = 2'-O-methylcytidine-3'-phosphorothioate
  modified_base 22: mod_base = OTHER; note = 2'-O-methyladenosine-3'-phosphorothioate
  modified_base 23: mod_base = OTHER; note = 2'-O-methyluridine-3'-phosphate
  misc_feature 1..4: note = RNA
  misc_feature 5: note = DNA
  misc_feature 6..23: note = RNA
tttaatcaagtttacaactgcat

SEQ ID NO: 1244 - DNA, 23 bp, synthetic construct
  source 1..23: mol_type = other DNA
  modified_base 1: mod_base = OTHER; note = Vinyl-phosphonate-2'-O-methyluridine-3'-phosphate
  modified_base 2: mod_base = OTHER; note = 2'-fluoroadenosine-3'-phosphate
  modified_base 3: mod_base = OTHER; note = 2'-O-methyluridine-3'-phosphate
  modified_base 4: mod_base = OTHER; note = 2'-O-methylcytidine-3'-phosphate
  modified_base 6: mod_base = OTHER; note = 2'-O-methyluridine-3'-phosphate
  modified_base 7: mod_base = OTHER; note = cytidine-2'-phosphate
  modified_base 8: mod_base = OTHER; note = 2'-O-methyluridine-3'-phosphate
  modified_base 9: mod_base = OTHER; note = 2'-O-methyluridine-3'-phosphate
  modified_base 10: mod_base = OTHER; note = 2'-O-methylguanosine-3'-phosphate
  modified_base 11: mod_base = OTHER; note = 2'-O-methyladenosine-3'-phosphate
  modified_base 12: mod_base = OTHER; note = 2'-O-methyluridine-3'-phosphate
  modified_base 13: mod_base = OTHER; note = 2'-O-methyladenosine-3'-phosphate
  modified_base 14: mod_base = OTHER; note = 2'-fluoroguanosine-3'-phosphate
  modified_base 15: mod_base = OTHER; note = 2'-O-methyluridine-3'-phosphate
  modified_base 16: mod_base = OTHER; note = 2'-fluorouridine-3'-phosphate
  modified_base 17: mod_base = OTHER; note = 2'-O-methyladenosine-3'-phosphate
  modified_base 18: mod_base = OTHER; note = 2'-O-methyladenosine-3'-phosphate
  modified_base 19: mod_base = OTHER; note = 2'-O-methyluridine-3'-phosphate
  modified_base 20: mod_base = OTHER; note = 2'-O-methylcytidine-3'-phosphate
  modified_base 21: mod_base = OTHER; note = 2'-O-methyladenosine-3'-phosphorothioate
  modified_base 22: mod_base = OTHER; note = 2'-O-methyladenosine-3'-phosphorothioate
  modified_base 23: mod_base = OTHER; note = 2'-O-methylguanosine-3'-phosphate
  misc_feature 1..4: note = RNA
  misc_feature 5: note = DNA
  misc_feature 6..23: note = RNA
tatcatcttgatagttaatcaag

SEQ ID NO: 1245 - DNA, 23 bp, synthetic construct
  source 1..23: mol_type = other DNA
  modified_base 1: mod_base = OTHER; note = Vinyl-phosphonate-2'-O-methyluridine-3'-phosphate
  modified_base 2: mod_base = OTHER; note = 2'-fluorouridine-3'-phosphate
  modified_base 3: mod_base = OTHER; note = 2'-O-methylguanosine-3'-phosphate
  modified_base 4: mod_base = OTHER; note = 2'-O-methylcytidine-3'-phosphate
  modified_base 6: mod_base = OTHER; note = 2'-O-methylcytidine-3'-phosphate
  modified_base 7: mod_base = OTHER; note = guanosine-2'-phosphate
  modified_base 8: mod_base = OTHER; note = 2'-O-methyluridine-3'-phosphate
  modified_base 9: mod_base = OTHER; note = 2'-O-methylguanosine-3'-phosphate
  modified_base 10: mod_base = OTHER; note = 2'-O-methyluridine-3'-phosphate
  modified_base 11: mod_base = OTHER; note = 2'-O-methylguanosine-3'-phosphate
  modified_base 12: mod_base = OTHER; note = 2'-O-methylguanosine-3'-phosphate
  modified_base 13: mod_base = OTHER; note = 2'-O-methylcytidine-3'-phosphate
  modified_base 14: mod_base = OTHER; note = 2'-fluoroadenosine-3'-phosphate
  modified_base 15: mod_base = OTHER; note = 2'-O-methyladenosine-3'-phosphate
  modified_base 16: mod_base = OTHER; note = 2'-fluoroguanosine-3'-phosphate
  modified_base 17: mod_base = OTHER; note = 2'-O-methyluridine-3'-phosphate
  modified_base 18: mod_base = OTHER; note = 2'-O-methyluridine-3'-phosphate
  modified_base 19: mod_base = OTHER; note = 2'-O-methylcytidine-3'-phosphate
  modified_base 20: mod_base = OTHER; note = 2'-O-methyluridine-3'-phosphate
  modified_base 21: mod_base = OTHER; note = 2'-O-methylguanosine-3'-phosphorothioate
  modified_base 22: mod_base = OTHER; note = 2'-O-methylcytidine-3'-phosphorothioate
  modified_base 23: mod_base = OTHER; note = 2'-O-methyladenosine-3'-phosphate
  misc_feature 1..4: note = RNA
  misc_feature 5: note = DNA
  misc_feature 6..23: note = RNA
ttgcacgtgtggcaagttctgca

SEQ ID NO: 1246 - DNA, 23 bp, synthetic construct
  source 1..23: mol_type = other DNA
  modified_base 1: mod_base = OTHER; note = Vinyl-phosphonate-2'-O-methyluridine-3'-phosphate
  modified_base 2: mod_base = OTHER; note = 2'-fluoroguanosine-3'-phosphate
  modified_base 3: mod_base = OTHER; note = 2'-O-methyluridine-3'-phosphate
  modified_base 4: mod_base = OTHER; note = 2'-O-methyluridine-3'-phosphate
  modified_base 6: mod_base = OTHER; note = 2'-O-methyladenosine-3'-phosphate
  modified_base 7: mod_base = OTHER; note = guanosine-2'-phosphate
  modified_base 8: mod_base = OTHER; note = 2'-O-methylguanosine-3'-phosphate
  modified_base 9: mod_base = OTHER; note = 2'-O-methylguanosine-3'-phosphate
  modified_base 10: mod_base = OTHER; note = 2'-O-methyladenosine-3'-phosphate
  modified_base 11: mod_base = OTHER; note = 2'-O-methyluridine-3'-phosphate
  modified_base 12: mod_base = OTHER; note = 2'-O-methyluridine-3'-phosphate
  modified_base 13: mod_base = OTHER; note = 2'-O-methylguanosine-3'-phosphate
  modified_base 14: mod_base = OTHER; note = 2'-fluorocytidine-3'-phosphate
  modified_base 15: mod_base = OTHER; note = 2'-O-methyladenosine-3'-phosphate
  modified_base 16: mod_base = OTHER; note = 2'-fluorocytidine-3'-phosphate
  modified_base 17: mod_base = OTHER; note = 2'-O-methylguanosine-3'-phosphate
  modified_base 18: mod_base = OTHER; note = 2'-O-methyluridine-3'-phosphate
  modified_base 19: mod_base = OTHER; note = 2'-O-methylguanosine-3'-phosphate
  modified_base 20: mod_base = OTHER; note = 2'-O-methyluridine-3'-phosphate
  modified_base 21: mod_base = OTHER; note = 2'-O-methylguanosine-3'-phosphorothioate
  modified_base 22: mod_base = OTHER; note = 2'-O-methylguanosine-3'-phosphorothioate
  modified_base 23: mod_base = OTHER; note = 2'-O-methylcytidine-3'-phosphate
  misc_feature 1..4: note = RNA
  misc_feature 5: note = DNA
  misc_feature 6..23: note = RNA
tgttcagggattgcacgtgtggc

SEQ ID NO: 1247 - DNA, 23 bp, synthetic construct
  source 1..23: mol_type = other DNA
  modified_base 1: mod_base = OTHER; note = Vinyl-phosphonate-2'-O-methyluridine-3'-phosphate
  modified_base 2: mod_base = OTHER; note = 2'-fluorouridine-3'-phosphate
  modified_base 3: mod_base = OTHER; note = 2'-O-methylguanosine-3'-phosphate
  modified_base 4: mod_base = OTHER; note = 2'-O-methyluridine-3'-phosphate
  modified_base 6: mod_base = OTHER; note = 2'-O-methyladenosine-3'-phosphate
  modified_base 7: mod_base = OTHER; note = guanosine-2'-phosphate
  modified_base 8: mod_base = OTHER; note = 2'-O-methyluridine-3'-phosphate
  modified_base 9: mod_base = OTHER; note = 2'-O-methyluridine-3'-phosphate
  modified_base 10: mod_base = OTHER; note = 2'-O-methylcytidine-3'-phosphate
  modified_base 11: mod_base = OTHER; note = 2'-O-methyladenosine-3'-phosphate
  modified_base 12: mod_base = OTHER; note = 2'-O-methylguanosine-3'-phosphate
  modified_base 13: mod_base = OTHER; note = 2'-O-methylguanosine-3'-phosphate
  modified_base 14: mod_base = OTHER; note = 2'-fluoroguanosine-3'-phosphate
  modified_base 15: mod_base = OTHER; note = 2'-O-methyladenosine-3'-phosphate
  modified_base 16: mod_base = OTHER; note = 2'-fluorouridine-3'-phosphate
  modified_base 17: mod_base = OTHER; note = 2'-O-methyluridine-3'-phosphate
  modified_base 18: mod_base = OTHER; note = 2'-O-methylguanosine-3'-phosphate
  modified_base 19: mod_base = OTHER; note = 2'-O-methylcytidine-3'-phosphate
  modified_base 20: mod_base = OTHER; note = 2'-O-methyladenosine-3'-phosphate
  modified_base 21: mod_base = OTHER; note = 2'-O-methylcytidine-3'-phosphorothioate
  modified_base 22: mod_base = OTHER; note = 2'-O-methylguanosine-3'-phosphorothioate
  modified_base 23: mod_base = OTHER; note = 2'-O-methyluridine-3'-phosphate
  misc_feature 1..4: note = RNA
  misc_feature 5: note = DNA
  misc_feature 6..23: note = RNA
ttgtcagttcagggattgcacgt

SEQ ID NO: 1248 - DNA, 23 bp, synthetic construct
  source 1..23: mol_type = other DNA
  modified_base 1: mod_base = OTHER; note = Vinyl-phosphonate-2'-O-methyluridine-3'-phosphate
  modified_base 2: mod_base = OTHER; note = 2'-fluorouridine-3'-phosphate
  modified_base 3: mod_base = OTHER; note = 2'-O-methyluridine-3'-phosphate
  modified_base 4: mod_base = OTHER; note = 2'-O-methyladenosine-3'-phosphate
  modified_base 6: mod_base = OTHER; note = 2'-O-methylcytidine-3'-phosphate
  modified_base 7: mod_base = OTHER; note = cytidine-2'-phosphate
  modified_base 8: mod_base = OTHER; note = 2'-O-methyladenosine-3'-phosphate
  modified_base 9: mod_base = OTHER; note = 2'-O-methylcytidine-3'-phosphate
  modified_base 10: mod_base = OTHER; note = 2'-O-methylcytidine-3'-phosphate
  modified_base 11: mod_base = OTHER; note = 2'-O-methyladenosine-3'-phosphate
  modified_base 12: mod_base = OTHER; note = 2'-O-methylcytidine-3'-phosphate
  modified_base 13: mod_base = OTHER; note = 2'-O-methylcytidine-3'-phosphate
  modified_base 14: mod_base = OTHER; note = 2'-fluorouridine-3'-phosphate
  modified_base 15: mod_base = OTHER; note = 2'-O-methylguanosine-3'-phosphate
  modified_base 16: mod_base = OTHER; note = 2'-fluoroguanosine-3'-phosphate
  modified_base 17: mod_base = OTHER; note = 2'-O-methyluridine-3'-phosphate
  modified_base 18: mod_base = OTHER; note = 2'-O-methylcytidine-3'-phosphate
  modified_base 19: mod_base = OTHER; note = 2'-O-methylcytidine-3'-phosphate
  modified_base 20: mod_base = OTHER; note = 2'-O-methyluridine-3'-phosphate
  modified_base 21: mod_base = OTHER; note = 2'-O-methylcytidine-3'-phosphorothioate
  modified_base 22: mod_base = OTHER; note = 2'-O-methylguanosine-3'-phosphorothioate
  modified_base 23: mod_base = OTHER; note = 2'-O-methyluridine-3'-phosphate
  misc_feature 1..4: note = RNA
  misc_feature 5: note = DNA
  misc_feature 6..23: note = RNA
tttaaccaccacctggtcctcgt

SEQ ID NO: 1249 - DNA, 23 bp, synthetic construct
  source 1..23: mol_type = other DNA
  modified_base 1: mod_base = OTHER; note = Vinyl-phosphonate-2'-O-methyluridine-3'-phosphate
  modified_base 2: mod_base = OTHER; note = 2'-fluoroguanosine-3'-phosphate
  modified_base 3: mod_base = OTHER; note = 2'-O-methylcytidine-3'-phosphate
  modified_base 4: mod_base = OTHER; note = 2'-O-methyladenosine-3'-phosphate
  modified_base 6: mod_base = OTHER; note = 2'-O-methylcytidine-3'-phosphate
  modified_base 7: mod_base = OTHER; note = cytidine-2'-phosphate
  modified_base 8: mod_base = OTHER; note = 2'-O-methyluridine-3'-phosphate
  modified_base 9: mod_base = OTHER; note = 2'-O-methyluridine-3'-phosphate
  modified_base 10: mod_base = OTHER; note = 2'-O-methyladenosine-3'-phosphate
  modified_base 11: mod_base = OTHER; note = 2'-O-methyluridine-3'-phosphate
  modified_base 12: mod_base = OTHER; note = 2'-O-methyluridine-3'-phosphate
  modified_base 13: mod_base = OTHER; note = 2'-O-methyladenosine-3'-phosphate
  modified_base 14: mod_base = OTHER; note = 2'-fluoroadenosine-3'-phosphate
  modified_base 15: mod_base = OTHER; note = 2'-O-methylcytidine-3'-phosphate
  modified_base 16: mod_base = OTHER; note = 2'-fluorocytidine-3'-phosphate
  modified_base 17: mod_base = OTHER; note = 2'-O-methyladenosine-3'-phosphate
  modified_base 18: mod_base = OTHER; note = 2'-O-methylcytidine-3'-phosphate
  modified_base 19: mod_base = OTHER; note = 2'-O-methylcytidine-3'-phosphate
  modified_base 20: mod_base = OTHER; note = 2'-O-methyladenosine-3'-phosphate
  modified_base 21: mod_base = OTHER; note = 2'-O-methylcytidine-3'-phosphorothioate
  modified_base 22: mod_base = OTHER; note = 2'-O-methylcytidine-3'-phosphorothioate
  modified_base 23: mod_base = OTHER; note = 2'-O-methyluridine-3'-phosphate
  misc_feature 1..4: note = RNA
  misc_feature 5: note = DNA
  misc_feature 6..23: note = RNA
tgcagccttattaaccaccacct

SEQ ID NO: 1250 - DNA, 23 bp, synthetic construct
  source 1..23: mol_type = other DNA
  modified_base 1: mod_base = OTHER; note = Vinyl-phosphonate-2'-O-methyluridine-3'-phosphate
  modified_base 2: mod_base = OTHER; note = 2'-fluorouridine-3'-phosphate
  modified_base 3: mod_base = OTHER; note = 2'-O-methyladenosine-3'-phosphate
  modified_base 4: mod_base = OTHER; note = 2'-O-methylcytidine-3'-phosphate
  modified_base 6: mod_base = OTHER; note = 2'-O-methyluridine-3'-phosphate
  modified_base 7: mod_base = OTHER; note = cytidine-2'-phosphate
  modified_base 8: mod_base = OTHER; note = 2'-O-methyladenosine-3'-phosphate
  modified_base 9: mod_base = OTHER; note = 2'-O-methyluridine-3'-phosphate
  modified_base 10: mod_base = OTHER; note = 2'-O-methyluridine-3'-phosphate
  modified_base 11: mod_base = OTHER; note = 2'-O-methyluridine-3'-phosphate
  modified_base 12: mod_base = OTHER; note = 2'-O-methylguanosine-3'-phosphate
  modified_base 13: mod_base = OTHER; note = 2'-O-methyluridine-3'-phosphate
  modified_base 14: mod_base = OTHER; note = 2'-fluoroadenosine-3'-phosphate
  modified_base 15: mod_base = OTHER; note = 2'-O-methyluridine-3'-phosphate
  modified_base 16: mod_base = OTHER; note = 2'-fluorouridine-3'-phosphate
  modified_base 17: mod_base = OTHER; note = 2'-O-methylcytidine-3'-phosphate
  modified_base 18: mod_base = OTHER; note = 2'-O-methyluridine-3'-phosphate
  modified_base 19: mod_base = OTHER; note = 2'-O-methylguanosine-3'-phosphate
  modified_base 20: mod_base = OTHER; note = 2'-O-methylcytidine-3'-phosphate
  modified_base 21: mod_base = OTHER; note = 2'-O-methyladenosine-3'-phosphorothioate
  modified_base 22: mod_base = OTHER; note = 2'-O-methyluridine-3'-phosphorothioate
  modified_base 23: mod_base = OTHER; note = 2'-O-methylguanosine-3'-phosphate
  misc_feature 1..4: note = RNA
  misc_feature 5: note = DNA
  misc_feature 6..23: note = RNA
ttacatcatttgtattctgcatg

SEQ ID NO: 1251 - DNA, 23 bp, synthetic construct
  source 1..23: mol_type = other DNA
  modified_base 1: mod_base = OTHER; note = Vinyl-phosphonate-2'-O-methyluridine-3'-phosphate
  modified_base 2: mod_base = OTHER; note = 2'-fluorouridine-3'-phosphate
  modified_base 3: mod_base = OTHER; note = 2'-O-methyluridine-3'-phosphate
  modified_base 4: mod_base = OTHER; note = 2'-O-methylcytidine-3'-phosphate
  modified_base 6: mod_base = OTHER; note = 2'-O-methyladenosine-3'-phosphate
  modified_base 7: mod_base = OTHER; note = cytidine-2'-phosphate
  modified_base 8: mod_base = OTHER; note = 2'-O-methyladenosine-3'-phosphate
  modified_base 9: mod_base = OTHER; note = 2'-O-methyluridine-3'-phosphate
  modified_base 10: mod_base = OTHER; note = 2'-O-methylcytidine-3'-phosphate
  modified_base 11: mod_base = OTHER; note = 2'-O-methyladenosine-3'-phosphate
  modified_base 12: mod_base = OTHER; note = 2'-O-methyluridine-3'-phosphate
  modified_base 13: mod_base = OTHER; note = 2'-O-methyluridine-3'-phosphate
  modified_base 14: mod_base = OTHER; note = 2'-fluorouridine-3'-phosphate
  modified_base 15: mod_base = OTHER; note = 2'-O-methylguanosine-3'-phosphate
  modified_base 16: mod_base = OTHER; note = 2'-fluorouridine-3'-phosphate
  modified_base 17: mod_base = OTHER; note = 2'-O-methyladenosine-3'-phosphate
  modified_base 18: mod_base = OTHER; note = 2'-O-methyluridine-3'-phosphate
  modified_base 19: mod_base = OTHER; note = 2'-O-methyluridine-3'-phosphate
  modified_base 20: mod_base = OTHER; note = 2'-O-methylcytidine-3'-phosphate
  modified_base 21: mod_base = OTHER; note = 2'-O-methyluridine-3'-phosphorothioate
  modified_base 22: mod_base = OTHER; note = 2'-O-methylguanosine-3'-phosphorothioate
  modified_base 23: mod_base = OTHER; note = 2'-O-methylcytidine-3'-phosphate
  misc_feature 1..4: note = RNA
  misc_feature 5: note = DNA
  misc_feature 6..23: note = RNA
tttctacatcatttgtattctgc

SEQ ID NO: 1252 - DNA, 23 bp, synthetic construct
  source 1..23: mol_type = other DNA
  modified_base 1: mod_base = OTHER; note = Vinyl-phosphonate-2'-O-methyluridine-3'-phosphate
  modified_base 2: mod_base = OTHER; note = 2'-fluoroadenosine-3'-phosphate
  modified_base 3: mod_base = OTHER; note = 2'-O-methyladenosine-3'-phosphate
  modified_base 4: mod_base = OTHER; note = 2'-O-methylcytidine-3'-phosphate
  modified_base 6: mod_base = OTHER; note = 2'-O-methyladenosine-3'-phosphate
  modified_base 7: mod_base = OTHER; note = guanosine-2'-phosphate
  modified_base 8: mod_base = OTHER; note = 2'-O-methylcytidine-3'-phosphate
  modified_base 9: mod_base = OTHER; note = 2'-O-methyluridine-3'-phosphate
  modified_base 10: mod_base = OTHER; note = 2'-O-methylguanosine-3'-phosphate
  modified_base 11: mod_base = OTHER; note = 2'-O-methyluridine-3'-phosphate
  modified_base 12: mod_base = OTHER; note = 2'-O-methyluridine-3'-phosphate
  modified_base 13: mod_base = OTHER; note = 2'-O-methyluridine-3'-phosphate
  modified_base 14: mod_base = OTHER; note = 2'-fluorocytidine-3'-phosphate
  modified_base 15: mod_base = OTHER; note = 2'-O-methyluridine-3'-phosphate
  modified_base 16: mod_base = OTHER; note = 2'-fluoroadenosine-3'-phosphate
  modified_base 17: mod_base = OTHER; note = 2'-O-methylcytidine-3'-phosphate
  modified_base 18: mod_base = OTHER; note = 2'-O-methyladenosine-3'-phosphate
  modified_base 19: mod_base = OTHER; note = 2'-O-methyluridine-3'-phosphate
  modified_base 20: mod_base = OTHER; note = 2'-O-methylcytidine-3'-phosphate
  modified_base 21: mod_base = OTHER; note = 2'-O-methyladenosine-3'-phosphorothioate
  modified_base 22: mod_base = OTHER; note = 2'-O-methyluridine-3'-phosphorothioate
  modified_base 23: mod_base = OTHER; note = 2'-O-methyluridine-3'-phosphate
  misc_feature 1..4: note = RNA
  misc_feature 5: note = DNA
  misc_feature 6..23: note = RNA
taacgagctgtttctacatcatt

SEQ ID NO: 1253 - DNA, 23 bp, synthetic construct
  source 1..23: mol_type = other DNA
  modified_base 1: mod_base = OTHER; note = Vinyl-phosphonate-2'-O-methyluridine-3'-phosphate
  modified_base 2: mod_base = OTHER; note = 2'-fluoroguanosine-3'-phosphate
  modified_base 3: mod_base = OTHER; note = 2'-O-methyladenosine-3'-phosphate
  modified_base 4: mod_base = OTHER; note = 2'-O-methyluridine-3'-phosphate
  modified_base 6: mod_base = OTHER; note = 2'-O-methylguanosine-3'-phosphate
  modified_base 7: mod_base = OTHER; note = guanosine-2'-phosphate
  modified_base 8: mod_base = OTHER; note = 2'-O-methyladenosine-3'-phosphate
  modified_base 9: mod_base = OTHER; note = 2'-O-methyladenosine-3'-phosphate
  modified_base 10: mod_base = OTHER; note = 2'-O-methyladenosine-3'-phosphate
  modified_base 11: mod_base = OTHER; note = 2'-O-methylguanosine-3'-phosphate
  modified_base 12: mod_base = OTHER; note = 2'-O-methylguanosine-3'-phosphate
  modified_base 13: mod_base = OTHER; note = 2'-O-methyluridine-3'-phosphate
  modified_base 14: mod_base = OTHER; note = 2'-fluorouridine-3'-phosphate
  modified_base 15: mod_base = OTHER; note = 2'-O-methyladenosine-3'-phosphate
  modified_base 16: mod_base = OTHER; note = 2'-fluorouridine-3'-phosphate
  modified_base 17: mod_base = OTHER; note = 2'-O-methylguanosine-3'-phosphate
  modified_base 18: mod_base = OTHER; note = 2'-O-methylcytidine-3'-phosphate
  modified_base 19: mod_base = OTHER; note = 2'-O-methyladenosine-3'-phosphate
  modified_base 20: mod_base = OTHER; note = 2'-O-methyladenosine-3'-phosphate
  modified_base 21: mod_base = OTHER; note = 2'-O-methylguanosine-3'-phosphorothioate
  modified_base 22: mod_base = OTHER; note = 2'-O-methylguanosine-3'-phosphorothioate
  modified_base 23: mod_base = OTHER; note = 2'-O-methyluridine-3'-phosphate
  misc_feature 1..4: note = RNA
  misc_feature 5: note = DNA
  misc_feature 6..23: note = RNA
tgatgggaaaggttatgcaaggt

SEQ ID NO: 1254 - DNA, 23 bp, synthetic construct
  source 1..23: mol_type = other DNA
  modified_base 1: mod_base = OTHER; note = Vinyl-phosphonate-2'-O-methyluridine-3'-phosphate
  modified_base 2: mod_base = OTHER; note = 2'-fluorouridine-3'-phosphate
  modified_base 3: mod_base = OTHER; note = 2'-O-methylguanosine-3'-phosphate
  modified_base 4: mod_base = OTHER; note = 2'-O-methyladenosine-3'-phosphate
  modified_base 6: mod_base = OTHER; note = 2'-O-methylguanosine-3'-phosphate
  modified_base 7: mod_base = OTHER; note = guanosine-2'-phosphate
  modified_base 8: mod_base = OTHER; note = 2'-O-methylguanosine-3'-phosphate
  modified_base 9: mod_base = OTHER; note = 2'-O-methyladenosine-3'-phosphate
  modified_base 10: mod_base = OTHER; note = 2'-O-methyladenosine-3'-phosphate
  modified_base 11: mod_base = OTHER; note = 2'-O-methyladenosine-3'-phosphate
  modified_base 12: mod_base = OTHER; note = 2'-O-methylguanosine-3'-phosphate
  modified_base 13: mod_base = OTHER; note = 2'-O-methylguanosine-3'-phosphate
  modified_base 14: mod_base = OTHER; note = 2'-fluorouridine-3'-phosphate
  modified_base 15: mod_base = OTHER; note = 2'-O-methyluridine-3'-phosphate
  modified_base 16: mod_base = OTHER; note = 2'-fluoroadenosine-3'-phosphate
  modified_base 17: mod_base = OTHER; note = 2'-O-methyluridine-3'-phosphate
  modified_base 18: mod_base = OTHER; note = 2'-O-methylguanosine-3'-phosphate
  modified_base 19: mod_base = OTHER; note = 2'-O-methylcytidine-3'-phosphate
  modified_base 20: mod_base = OTHER; note = 2'-O-methyladenosine-3'-phosphate
  modified_base 21: mod_base = OTHER; note = 2'-O-methyladenosine-3'-phosphorothioate
  modified_base 22: mod_base = OTHER; note = 2'-O-methylguanosine-3'-phosphorothioate
  modified_base 23: mod_base = OTHER; note = 2'-O-methylguanosine-3'-phosphate
  misc_feature 1..4: note = RNA
  misc_feature 5: note = DNA
  misc_feature 6..23: note = RNA
ttgatgggaaaggttatgcaagg

SEQ ID NO: 1255 - DNA, 23 bp, synthetic construct
  source 1..23: mol_type = other DNA
  modified_base 1: mod_base = OTHER; note = Vinyl-phosphonate-2'-O-methyluridine-3'-phosphate
  modified_base 2: mod_base = OTHER; note = 2'-fluoroguanosine-3'-phosphate
  modified_base 3: mod_base = OTHER; note = 2'-O-methylcytidine-3'-phosphate
  modified_base 4: mod_base = OTHER; note = 2'-O-methylcytidine-3'-phosphate
  modified_base 6: mod_base = OTHER; note = 2'-O-methylcytidine-3'-phosphate
  modified_base 7: mod_base = OTHER; note = cytidine-2'-phosphate
  modified_base 8: mod_base = OTHER; note = 2'-O-methyladenosine-3'-phosphate
  modified_base 9: mod_base = OTHER; note = 2'-O-methylguanosine-3'-phosphate
  modified_base 10: mod_base = OTHER; note = 2'-O-methyladenosine-3'-phosphate
  modified_base 11: mod_base = OTHER; note = 2'-O-methylcytidine-3'-phosphate
  modified_base 12: mod_base = OTHER; note = 2'-O-methyluridine-3'-phosphate
  modified_base 13: mod_base = OTHER; note = 2'-O-methyluridine-3'-phosphate
  modified_base 14: mod_base = OTHER; note = 2'-fluoroadenosine-3'-phosphate
  modified_base 15: mod_base = OTHER; note = 2'-O-methyladenosine-3'-phosphate
  modified_base 16: mod_base = OTHER; note = 2'-fluoroadenosine-3'-phosphate
  modified_base 17: mod_base = OTHER; note = 2'-O-methylguanosine-3'-phosphate
  modified_base 18: mod_base = OTHER; note = 2'-O-methyladenosine-3'-phosphate
  modified_base 19: mod_base = OTHER; note = 2'-O-methyluridine-3'-phosphate
  modified_base 20: mod_base = OTHER; note = 2'-O-methylguanosine-3'-phosphate
  modified_base 21: mod_base = OTHER; note = 2'-O-methylguanosine-3'-phosphorothioate
  modified_base 22: mod_base = OTHER; note = 2'-O-methylcytidine-3'-phosphorothioate
  modified_base 23: mod_base = OTHER; note = 2'-O-methylcytidine-3'-phosphate
  misc_feature 1..4: note = RNA
  misc_feature 5: note = DNA
  misc_feature 6..23: note = RNA
tgcctccagacttaaagatggcc

SEQ ID NO: 1256 - DNA, 23 bp, synthetic construct
  source 1..23: mol_type = other DNA
  modified_base 1: mod_base = OTHER; note = Vinyl-phosphonate-2'-O-methyluridine-3'-phosphate
  modified_base 2: mod_base = OTHER; note = 2'-fluorouridine-3'-phosphate
  modified_base 3: mod_base = OTHER; note = 2'-O-methyluridine-3'-phosphate
  modified_base 4: mod_base = OTHER; note = 2'-O-methylguanosine-3'-phosphate
  modified_base 6: mod_base = OTHER; note = 2'-O-methylguanosine-3'-phosphate
  modified_base 7: mod_base = OTHER; note = guanosine-2'-phosphate
  modified_base 8: mod_base = OTHER; note = 2'-O-methyladenosine-3'-phosphate
  modified_base 9: mod_base = OTHER; note = 2'-O-methylguanosine-3'-phosphate
  modified_base 10: mod_base = OTHER; note = 2'-O-methyladenosine-3'-phosphate
  modified_base 11: mod_base = OTHER; note = 2'-O-methylguanosine-3'-phosphate
  modified_base 12: mod_base = OTHER; note = 2'-O-methyluridine-3'-phosphate
  modified_base 13: mod_base = OTHER; note = 2'-O-methyluridine-3'-phosphate
  modified_base 14: mod_base = OTHER; note = 2'-fluoroguanosine-3'-phosphate
  modified_base 15: mod_base = OTHER; note = 2'-O-methyluridine-3'-phosphate
  modified_base 16: mod_base = OTHER; note = 2'-fluoroadenosine-3'-phosphate
  modified_base 17: mod_base = OTHER; note = 2'-O-methyladenosine-3'-phosphate
  modified_base 18: mod_base = OTHER; note = 2'-O-methyluridine-3'-phosphate
  modified_base 19: mod_base = OTHER; note = 2'-O-methylguanosine-3'-phosphate
  modified_base 20: mod_base = OTHER; note = 2'-O-methylguanosine-3'-phosphate
  modified_base 21: mod_base = OTHER; note = 2'-O-methylcytidine-3'-phosphorothioate
  modified_base 22: mod_base = OTHER; note = 2'-O-methyladenosine-3'-phosphorothioate
  modified_base 23: mod_base = OTHER; note = 2'-O-methyluridine-3'-phosphate
  misc_feature 1..4: note = RNA
  misc_feature 5: note = DNA
  misc_feature 6..23: note = RNA
tttgtggagagttgtaatggcat

SEQ ID NO: 1257 - DNA, 23 bp, synthetic construct
  source 1..23: mol_type = other DNA
  modified_base 1: mod_base = OTHER; note = Vinyl-phosphonate-2'-O-methyluridine-3'-phosphate
  modified_base 2: mod_base = OTHER; note = 2'-fluoroguanosine-3'-phosphate
  modified_base 3: mod_base = OTHER; note = 2'-O-methyluridine-3'-phosphate
  modified_base 4: mod_base = OTHER; note = 2'-O-methyluridine-3'-phosphate
  modified_base 6: mod_base = OTHER; note = 2'-O-methyluridine-3'-phosphate
  modified_base 7: mod_base = OTHER; note = guanosine-2'-phosphate
  modified_base 8: mod_base = OTHER; note = 2'-O-methyluridine-3'-phosphate
  modified_base 9: mod_base = OTHER; note = 2'-O-methyluridine-3'-phosphate
  modified_base 10: mod_base = OTHER; note = 2'-O-methylguanosine-3'-phosphate
  modified_base 11: mod_base = OTHER; note = 2'-O-methyladenosine-3'-phosphate
  modified_base 12: mod_base = OTHER; note = 2'-O-methylguanosine-3'-phosphate
  modified_base 13: mod_base = OTHER; note = 2'-O-methylcytidine-3'-phosphate
  modified_base 14: mod_base = OTHER; note = 2'-fluoroadenosine-3'-phosphate
  modified_base 15: mod_base = OTHER; note = 2'-O-methyladenosine-3'-phosphate
  modified_base 16: mod_base = OTHER; note = 2'-fluoroguanosine-3'-phosphate
  modified_base 17: mod_base = OTHER; note = 2'-O-methylguanosine-3'-phosphate
  modified_base 18: mod_base = OTHER; note = 2'-O-methylcytidine-3'-phosphate
  modified_base 19: mod_base = OTHER; note = 2'-O-methyladenosine-3'-phosphate
  modified_base 20: mod_base = OTHER; note = 2'-O-methyladenosine-3'-phosphate
  modified_base 21: mod_base = OTHER; note = 2'-O-methylcytidine-3'-phosphorothioate
  modified_base 22: mod_base = OTHER; note = 2'-O-methylcytidine-3'-phosphorothioate
  modified_base 23: mod_base = OTHER; note = 2'-O-methyladenosine-3'-phosphate
  misc_feature 1..4: note = RNA
  misc_feature 5: note = DNA
  misc_feature 6..23: note = RNA
tgttttgttgagcaaggcaacca

SEQ ID NO: 1258 - DNA, 23 bp, synthetic construct
  source 1..23: mol_type = other DNA
  modified_base 1: mod_base = OTHER; note = Vinyl-phosphonate-2'-O-methyluridine-3'-phosphate
  modified_base 2: mod_base = OTHER; note = 2'-fluorocytidine-3'-phosphate
  modified_base 3: mod_base = OTHER; note = 2'-O-methyluridine-3'-phosphate
  modified_base 4: mod_base = OTHER; note = 2'-O-methylguanosine-3'-phosphate
  modified_base 6: mod_base = OTHER; note = 2'-O-methylcytidine-3'-phosphate
  modified_base 7: mod_base = OTHER; note = guanosine-2'-phosphate
  modified_base 8: mod_base = OTHER; note = 2'-O-methyluridine-3'-phosphate
  modified_base 9: mod_base = OTHER; note = 2'-O-methyladenosine-3'-phosphate
  modified_base 10: mod_base = OTHER; note = 2'-O-methyladenosine-3'-phosphate
  modified_base 11: mod_base = OTHER; note = 2'-O-methyluridine-3'-phosphate
  modified_base 12: mod_base = OTHER; note = 2'-O-methyladenosine-3'-phosphate
  modified_base 13: mod_base = OTHER; note = 2'-O-methylguanosine-3'-phosphate
  modified_base 14: mod_base = OTHER; note = 2'-fluorocytidine-3'-phosphate
  modified_base 15: mod_base = OTHER; note = 2'-O-methylcytidine-3'-phosphate
  modified_base 16: mod_base = OTHER; note = 2'-fluoroadenosine-3'-phosphate
  modified_base 17: mod_base = OTHER; note = 2'-O-methyladenosine-3'-phosphate
  modified_base 18: mod_base = OTHER; note = 2'-O-methylguanosine-3'-phosphate
  modified_base 19: mod_base = OTHER; note = 2'-O-methyladenosine-3'-phosphate
  modified_base 20: mod_base = OTHER; note = 2'-O-methyladenosine-3'-phosphate
  modified_base 21: mod_base = OTHER; note = 2'-O-methyluridine-3'-phosphorothioate
  modified_base 22: mod_base = OTHER; note = 2'-O-methyluridine-3'-phosphorothioate
  modified_base 23: mod_base = OTHER; note = 2'-O-methyluridine-3'-phosphate
  misc_feature 1..4: note = RNA
  misc_feature 5: note = DNA
  misc_feature 6..23: note = RNA
tctgtcgtaatagccaagaattt

SEQ ID NO: 1259 - DNA, 23 bp, synthetic construct
  source 1..23: mol_type = other DNA
  modified_base 1: mod_base = OTHER; note = Vinyl-phosphonate-2'-O-methyluridine-3'-phosphate
  modified_base 2: mod_base = OTHER; note = 2'-fluorouridine-3'-phosphate
  modified_base 3: mod_base = OTHER; note = 2'-O-methyladenosine-3'-phosphate
  modified_base 4: mod_base = OTHER; note = 2'-O-methyluridine-3'-phosphate
  modified_base 6: mod_base = OTHER; note = 2'-O-methylguanosine-3'-phosphate
  modified_base 7: mod_base = OTHER; note = guanosine-2'-phosphate
  modified_base 8: mod_base = OTHER; note = 2'-O-methyluridine-3'-phosphate
  modified_base 9: mod_base = OTHER; note = 2'-O-methylcytidine-3'-phosphate
  modified_base 10: mod_base = OTHER; note = 2'-O-methylcytidine-3'-phosphate
  modified_base 11: mod_base = OTHER; note = 2'-O-methyluridine-3'-phosphate
  modified_base 12: mod_base = OTHER; note = 2'-O-methylcytidine-3'-phosphate
  modified_base 13: mod_base = OTHER; note = 2'-O-methyladenosine-3'-phosphate
  modified_base 14: mod_base = OTHER; note = 2'-fluorouridine-3'-phosphate
  modified_base 15: mod_base = OTHER; note = 2'-O-methyluridine-3'-phosphate
  modified_base 16: mod_base = OTHER; note = 2'-fluoroadenosine-3'-phosphate
  modified_base 17: mod_base = OTHER; note = 2'-O-methyluridine-3'-phosphate
  modified_base 18: mod_base = OTHER; note = 2'-O-methyladenosine-3'-phosphate
  modified_base 19: mod_base = OTHER; note = 2'-O-methyluridine-3'-phosphate
  modified_base 20: mod_base = OTHER; note = 2'-O-methyluridine-3'-phosphate
  modified_base 21: mod_base = OTHER; note = 2'-O-methyluridine-3'-phosphorothioate
  modified_base 22: mod_base = OTHER; note = 2'-O-methyladenosine-3'-phosphorothioate
  modified_base 23: mod_base = OTHER; note = 2'-O-methylcytidine-3'-phosphate
  misc_feature 1..4: note = RNA
  misc_feature 5: note = DNA
  misc_feature 6..23: note = RNA
ttataggtcctcattatatttac

SEQ ID NO: 1260 - DNA, 23 bp, synthetic construct
  source 1..23: mol_type = other DNA
  modified_base 1: mod_base = OTHER; note = Vinyl-phosphonate-2'-O-methyluridine-3'-phosphate
  modified_base 2: mod_base = OTHER; note = 2'-fluoroguanosine-3'-phosphate
  modified_base 3: mod_base = OTHER; note = 2'-O-methyluridine-3'-phosphate
  modified_base 4: mod_base = OTHER; note = 2'-O-methyladenosine-3'-phosphate
  modified_base 6: mod_base = OTHER; note = 2'-O-methyladenosine-3'-phosphate
  modified_base 7: mod_base = OTHER; note = guanosine-2'-phosphate
  modified_base 8: mod_base = OTHER; note = 2'-O-methylguanosine-3'-phosphate
  modified_base 9: mod_base = OTHER; note = 2'-O-methyluridine-3'-phosphate
  modified_base 10: mod_base = OTHER; note = 2'-O-methylcytidine-3'-phosphate
  modified_base 11: mod_base = OTHER; note = 2'-O-methylcytidine-3'-phosphate
  modified_base 12: mod_base = OTHER; note = 2'-O-methyluridine-3'-phosphate
  modified_base 13: mod_base = OTHER; note = 2'-O-methylcytidine-3'-phosphate
  modified_base 14: mod_base = OTHER; note = 2'-fluoroadenosine-3'-phosphate
  modified_base 15: mod_base = OTHER; note = 2'-O-methyluridine-3'-phosphate
  modified_base 16: mod_base = OTHER; note = 2'-fluorouridine-3'-phosphate
  modified_base 17: mod_base = OTHER; note = 2'-O-methyladenosine-3'-phosphate
  modified_base 18: mod_base = OTHER; note = 2'-O-methyluridine-3'-phosphate
  modified_base 19: mod_base = OTHER; note = 2'-O-methyladenosine-3'-phosphate
  modified_base 20: mod_base = OTHER; note = 2'-O-methyluridine-3'-phosphate
  modified_base 21: mod_base = OTHER; note = 2'-O-methyluridine-3'-phosphorothioate
  modified_base 22: mod_base = OTHER; note = 2'-O-methyluridine-3'-phosphorothioate
  modified_base 23: mod_base = OTHER; note = 2'-O-methyladenosine-3'-phosphate
  misc_feature 1..4: note = RNA
  misc_feature 5: note = DNA
  misc_feature 6..23: note = RNA
tgtataggtcctcattatattta

SEQ ID NO: 1261 - DNA, 23 bp, synthetic construct
  source 1..23: mol_type = other DNA
  modified_base 1: mod_base = OTHER; note = Vinyl-phosphonate-2'-O-methyluridine-3'-phosphate
  modified_base 2: mod_base = OTHER; note = 2'-fluorouridine-3'-phosphate
  modified_base 3: mod_base = OTHER; note = 2'-O-methyladenosine-3'-phosphate
  modified_base 4: mod_base = OTHER; note = 2'-O-methylguanosine-3'-phosphate
  modified_base 6: mod_base = OTHER; note = 2'-O-methyladenosine-3'-phosphate
  modified_base 7: mod_base = OTHER; note = cytidine-2'-phosphate
  modified_base 8: mod_base = OTHER; note = 2'-O-methylcytidine-3'-phosphate
  modified_base 9: mod_base = OTHER; note = 2'-O-methyluridine-3'-phosphate
  modified_base 10: mod_base = OTHER; note = 2'-O-methyluridine-3'-phosphate
  modified_base 11: mod_base = OTHER; note = 2'-O-methylcytidine-3'-phosphate
  modified_base 12: mod_base = OTHER; note = 2'-O-methyladenosine-3'-phosphate
  modified_base 13: mod_base = OTHER; note = 2'-O-methylguanosine-3'-phosphate
  modified_base 14: mod_base = OTHER; note = 2'-fluorocytidine-3'-phosphate
  modified_base 15: mod_base = OTHER; note = 2'-O-methyladenosine-3'-phosphate
  modified_base 16: mod_base = OTHER; note = 2'-fluorocytidine-3'-phosphate
  modified_base 17: mod_base = OTHER; note = 2'-O-methyluridine-3'-phosphate
  modified_base 18: mod_base = OTHER; note = 2'-O-methylcytidine-3'-phosphate
  modified_base 19: mod_base = OTHER; note = 2'-O-methyluridine-3'-phosphate
  modified_base 20: mod_base = OTHER; note = 2'-O-methylguanosine-3'-phosphate
  modified_base 21: mod_base = OTHER; note = 2'-O-methylcytidine-3'-phosphorothioate
  modified_base 22: mod_base = OTHER; note = 2'-O-methyluridine-3'-phosphorothioate
  modified_base 23: mod_base = OTHER; note = 2'-O-methyluridine-3'-phosphate
  misc_feature 1..4: note = RNA
  misc_feature 5: note = DNA
  misc_feature 6..23: note = RNA
ttagcaccttcagcactctgctt

SEQ ID NO: 1262 - DNA, 23 bp, synthetic construct
  source 1..23: mol_type = other DNA
  modified_base 1: mod_base = OTHER; note = Vinyl-phosphonate-2'-O-methyluridine-3'-phosphate
  modified_base 2: mod_base = OTHER; note = 2'-fluorouridine-3'-phosphate
  modified_base 3: mod_base = OTHER; note = 2'-O-methyladenosine-3'-phosphate
  modified_base 4: mod_base = OTHER; note = 2'-O-methyluridine-3'-phosphate
  modified_base 6: mod_base = OTHER; note = 2'-O-methyluridine-3'-phosphate
  modified_base 7: mod_base = OTHER; note = cytidine-2'-phosphate
  modified_base 8: mod_base = OTHER; note = 2'-O-methyladenosine-3'-phosphate
  modified_base 9: mod_base = OTHER; note = 2'-O-methyluridine-3'-phosphate
  modified_base 10: mod_base = OTHER; note = 2'-O-methylcytidine-3'-phosphate
  modified_base 11: mod_base = OTHER; note = 2'-O-methyluridine-3'-phosphate
  modified_base 12: mod_base = OTHER; note = 2'-O-methylguanosine-3'-phosphate
  modified_base 13: mod_base = OTHER; note = 2'-O-methyladenosine-3'-phosphate
  modified_base 14: mod_base = OTHER; note = 2'-fluoroadenosine-3'-phosphate
  modified_base 15: mod_base = OTHER; note = 2'-O-methylcytidine-3'-phosphate
  modified_base 16: mod_base = OTHER; note = 2'-fluorocytidine-3'-phosphate
  modified_base 17: mod_base = OTHER; note = 2'-O-methylcytidine-3'-phosphate
  modified_base 18: mod_base = OTHER; note = 2'-O-methyladenosine-3'-phosphate
  modified_base 19: mod_base = OTHER; note = 2'-O-methylguanosine-3'-phosphate
  modified_base 20: mod_base = OTHER; note = 2'-O-methyladenosine-3'-phosphate
  modified_base 21: mod_base = OTHER; note = 2'-O-methyladenosine-3'-phosphorothioate
  modified_base 22: mod_base = OTHER; note = 2'-O-methylguanosine-3'-phosphorothioate
  modified_base 23: mod_base = OTHER; note = 2'-O-methylcytidine-3'-phosphate
  misc_feature 1..4: note = RNA
  misc_feature 5: note = DNA
  misc_feature 6..23: note = RNA
ttatatcatctgaacccagaagc

SEQ ID NO: 1263 - DNA, 23 bp, synthetic construct
  source 1..23: mol_type = other DNA
  modified_base 1: mod_base = OTHER; note = Vinyl-phosphonate-2'-O-methyluridine-3'-phosphate
  modified_base 2: mod_base = OTHER; note = 2'-fluoroguanosine-3'-phosphate
  modified_base 3: mod_base = OTHER; note = 2'-O-methyluridine-3'-phosphate
  modified_base 4: mod_base = OTHER; note = 2'-O-methylguanosine-3'-phosphate
  modified_base 6: mod_base = OTHER; note = 2'-O-methylcytidine-3'-phosphate
  modified_base 7: mod_base = OTHER; note = cytidine-2'-phosphate
  modified_base 8: mod_base = OTHER; note = 2'-O-methyladenosine-3'-phosphate
  modified_base 9: mod_base = OTHER; note = 2'-O-methylcytidine-3'-phosphate
  modified_base 10: mod_base = OTHER; note = 2'-O-methyladenosine-3'-phosphate
  modified_base 11: mod_base = OTHER; note = 2'-O-methyluridine-3'-phosphate
  modified_base 12: mod_base = OTHER; note = 2'-O-methyluridine-3'-phosphate
  modified_base 13: mod_base = OTHER; note = 2'-O-methyluridine-3'-phosphate
  modified_base 14: mod_base = OTHER; note = 2'-fluoroadenosine-3'-phosphate
  modified_base 15: mod_base = OTHER; note = 2'-O-methyluridine-3'-phosphate
  modified_base 16: mod_base = OTHER; note = 2'-fluoroadenosine-3'-phosphate
  modified_base 17: mod_base = OTHER; note = 2'-O-methyluridine-3'-phosphate
  modified_base 18: mod_base = OTHER; note = 2'-O-methylcytidine-3'-phosphate
  modified_base 19: mod_base = OTHER; note = 2'-O-methyladenosine-3'-phosphate
  modified_base 20: mod_base = OTHER; note = 2'-O-methyluridine-3'-phosphate
  modified_base 21: mod_base = OTHER; note = 2'-O-methylcytidine-3'-phosphorothioate
  modified_base 22: mod_base = OTHER; note = 2'-O-methyluridine-3'-phosphorothioate
  modified_base 23: mod_base = OTHER; note = 2'-O-methylguanosine-3'-phosphate
  misc_feature 1..4: note = RNA
  misc_feature 5: note = DNA
  misc_feature 6..23: note = RNA
tgtgaccacatttatatcatctg

SEQ ID NO: 1264 - DNA, 23 bp, synthetic construct
  source 1..23: mol_type = other DNA
  modified_base 1: mod_base = OTHER; note = Vinyl-phosphonate-2'-O-methyluridine-3'-phosphate
  modified_base 2: mod_base = OTHER; note = 2'-fluoroguanosine-3'-phosphate
  modified_base 3: mod_base = OTHER; note = 2'-O-methyluridine-3'-phosphate
  modified_base 4: mod_base = OTHER; note = 2'-O-methylguanosine-3'-phosphate
  modified_base 6: mod_base = OTHER; note = 2'-O-methylguanosine-3'-phosphate
  modified_base 7: mod_base = OTHER; note = guanosine-2'-phosphate
  modified_base 8: mod_base = OTHER; note = 2'-O-methyluridine-3'-phosphate
  modified_base 9: mod_base = OTHER; note = 2'-O-methyluridine-3'-phosphate
  modified_base 10: mod_base = OTHER; note = 2'-O-methyladenosine-3'-phosphate
  modified_base 11: mod_base = OTHER; note = 2'-O-methylguanosine-3'-phosphate
  modified_base 12: mod_base = OTHER; note = 2'-O-methyladenosine-3'-phosphate
  modified_base 13: mod_base = OTHER; note = 2'-O-methyladenosine-3'-phosphate
  modified_base 14: mod_base = OTHER; note = 2'-fluoroadenosine-3'-phosphate
  modified_base 15: mod_base = OTHER; note = 2'-O-methylguanosine-3'-phosphate
  modified_base 16: mod_base = OTHER; note = 2'-fluoroadenosine-3'-phosphate
  modified_base 17: mod_base = OTHER; note = 2'-O-methyladenosine-3'-phosphate
  modified_base 18: mod_base = OTHER; note = 2'-O-methyluridine-3'-phosphate
  modified_base 19: mod_base = OTHER; note = 2'-O-methyluridine-3'-phosphate
  modified_base 20: mod_base = OTHER; note = 2'-O-methylcytidine-3'-phosphate
  modified_base 21: mod_base = OTHER; note = 2'-O-methylcytidine-3'-phosphorothioate
  modified_base 22: mod_base = OTHER; note = 2'-O-methyladenosine-3'-phosphorothioate
  modified_base 23: mod_base = OTHER; note = 2'-O-methylguanosine-3'-phosphate
  misc_feature 1..4: note = RNA
  misc_feature 5: note = DNA
  misc_feature 6..23: note = RNA
tgtgaggttagaaagaattccag

SEQ ID NO: 1265 - DNA, 23 bp, synthetic construct
  source 1..23: mol_type = other DNA
  modified_base 1: mod_base = OTHER; note = Vinyl-phosphonate-2'-O-methyluridine-3'-phosphate
  modified_base 2: mod_base = OTHER; note = 2'-fluorouridine-3'-phosphate
  modified_base 3: mod_base = OTHER; note = 2'-O-methylguanosine-3'-phosphate
  modified_base 4: mod_base = OTHER; note = 2'-O-methylcytidine-3'-phosphate
  modified_base 6: mod_base = OTHER; note = 2'-O-methyladenosine-3'-phosphate
  modified_base 7: mod_base = OTHER; note = guanosine-2'-phosphate
  modified_base 8: mod_base = OTHER; note = 2'-O-methyluridine-3'-phosphate
  modified_base 9: mod_base = OTHER; note = 2'-O-methylguanosine-3'-phosphate
  modified_base 10: mod_base = OTHER; note = 2'-O-methyladenosine-3'-phosphate
  modified_base 11: mod_base = OTHER; note = 2'-O-methylguanosine-3'-phosphate
  modified_base 12: mod_base = OTHER; note = 2'-O-methylguanosine-3'-phosphate
  modified_base 13: mod_base = OTHER; note = 2'-O-methyluridine-3'-phosphate
  modified_base 14: mod_base = OTHER; note = 2'-fluorouridine-3'-phosphate
  modified_base 15: mod_base = OTHER; note = 2'-O-methyladenosine-3'-phosphate
  modified_base 16: mod_base = OTHER; note = 2'-fluoroguanosine-3'-phosphate
  modified_base 17: mod_base = OTHER; note = 2'-O-methyladenosine-3'-phosphate
  modified_base 18: mod_base = OTHER; note = 2'-O-methyladenosine-3'-phosphate
  modified_base 19: mod_base = OTHER; note = 2'-O-methyladenosine-3'-phosphate
  modified_base 20: mod_base = OTHER; note = 2'-O-methylguanosine-3'-phosphate
  modified_base 21: mod_base = OTHER; note = 2'-O-methyladenosine-3'-phosphorothioate
  modified_base 22: mod_base = OTHER; note = 2'-O-methyladenosine-3'-phosphorothioate
  modified_base 23: mod_base = OTHER; note = 2'-O-methyluridine-3'-phosphate
  misc_feature 1..4: note = RNA
  misc_feature 5: note = DNA
  misc_feature 6..23: note = RNA
ttgcaagtgaggttagaaagaat

SEQ ID NO: 1266 - DNA, 23 bp, synthetic construct
  source 1..23: mol_type = other DNA
  modified_base 1: mod_base = OTHER; note = Vinyl-phosphonate-2'-O-methyluridine-3'-phosphate
  modified_base 2: mod_base = OTHER; note = 2'-fluorouridine-3'-phosphate
  modified_base 3: mod_base = OTHER; note = 2'-O-methyladenosine-3'-phosphate
  modified_base 4: mod_base = OTHER; note = 2'-O-methyluridine-3'-phosphate
  modified_base 6: mod_base = OTHER; note = 2'-O-methylguanosine-3'-phosphate
  modified_base 7: mod_base = OTHER; note = cytidine-2'-phosphate
  modified_base 8: mod_base = OTHER; note = 2'-O-methyladenosine-3'-phosphate
  modified_base 9: mod_base = OTHER; note = 2'-O-methyladenosine-3'-phosphate
  modified_base 10: mod_base = OTHER; note = 2'-O-methylguanosine-3'-phosphate
  modified_base 11: mod_base = OTHER; note = 2'-O-methyluridine-3'-phosphate
  modified_base 12: mod_base = OTHER; note = 2'-O-methylguanosine-3'-phosphate
  modified_base 13: mod_base = OTHER; note = 2'-O-methyladenosine-3'-phosphate
  modified_base 14: mod_base = OTHER; note = 2'-fluoroguanosine-3'-phosphate
  modified_base 15: mod_base = OTHER; note = 2'-O-methylguanosine-3'-phosphate
  modified_base 16: mod_base = OTHER; note = 2'-fluorouridine-3'-phosphate
  modified_base 17: mod_base = OTHER; note = 2'-O-methyluridine-3'-phosphate
  modified_base 18: mod_base = OTHER; note = 2'-O-methyladenosine-3'-phosphate
  modified_base 19: mod_base = OTHER; note = 2'-O-methylguanosine-3'-phosphate
  modified_base 20: mod_base = OTHER; note = 2'-O-methyladenosine-3'-phosphate
  modified_base 21: mod_base = OTHER; note = 2'-O-methyladenosine-3'-phosphorothioate
  modified_base 22: mod_base = OTHER; note = 2'-O-methyladenosine-3'-phosphorothioate
  modified_base 23: mod_base = OTHER; note = 2'-O-methylguanosine-3'-phosphate
  misc_feature 1..4: note = RNA
  misc_feature 5: note = DNA
  misc_feature 6..23: note = RNA
ttattgcaagtgaggttagaaag

SEQ ID NO: 1267 - DNA, 23 bp, synthetic construct
  source 1..23: mol_type = other DNA
  modified_base 1: mod_base = OTHER; note = Vinyl-phosphonate-2'-O-methyluridine-3'-phosphate
  modified_base 2: mod_base = OTHER; note = 2'-fluorouridine-3'-phosphate
  modified_base 3: mod_base = OTHER; note = 2'-O-methyluridine-3'-phosphate
  modified_base 4: mod_base = OTHER; note = 2'-O-methyladenosine-3'-phosphate
  modified_base 6: mod_base = OTHER; note = 2'-O-methyluridine-3'-phosphate
  modified_base 7: mod_base = OTHER; note = guanosine-2'-phosphate
  modified_base 8: mod_base = OTHER; note = 2'-O-methylcytidine-3'-phosphate
  modified_base 9: mod_base = OTHER; note = 2'-O-methyladenosine-3'-phosphate
  modified_base 10: mod_base = OTHER; note = 2'-O-methyladenosine-3'-phosphate
  modified_base 11: mod_base = OTHER; note = 2'-O-methylguanosine-3'-phosphate
  modified_base 12: mod_base = OTHER; note = 2'-O-methyluridine-3'-phosphate
  modified_base 13: mod_base = OTHER; note = 2'-O-methylguanosine-3'-phosphate
  modified_base 14: mod_base = OTHER; note = 2'-fluoroadenosine-3'-phosphate
  modified_base 15: mod_base = OTHER; note = 2'-O-methylguanosine-3'-phosphate
  modified_base 16: mod_base = OTHER; note = 2'-fluoroguanosine-3'-phosphate
  modified_base 17: mod_base = OTHER; note = 2'-O-methyluridine-3'-phosphate
  modified_base 18: mod_base = OTHER; note = 2'-O-methyluridine-3'-phosphate
  modified_base 19: mod_base = OTHER; note = 2'-O-methyladenosine-3'-phosphate
  modified_base 20: mod_base = OTHER; note = 2'-O-methylguanosine-3'-phosphate
  modified_base 21: mod_base = OTHER; note = 2'-O-methyladenosine-3'-phosphorothioate
  modified_base 22: mod_base = OTHER; note = 2'-O-methyladenosine-3'-phosphorothioate
  modified_base 23: mod_base = OTHER; note = 2'-O-methyladenosine-3'-phosphate
  misc_feature 1..4: note = RNA
  misc_feature 5: note = DNA
  misc_feature 6..23: note = RNA
tttattgcaagtgaggttagaaa

SEQ ID NO: 1268 - DNA, 23 bp, synthetic construct
  source 1..23: mol_type = other DNA
  modified_base 1: mod_base = OTHER; note = Vinyl-phosphonate-2'-O-methyluridine-3'-phosphate
  modified_base 2: mod_base = OTHER; note = 2'-fluoroadenosine-3'-phosphate
  modified_base 3: mod_base = OTHER; note = 2'-O-methylguanosine-3'-phosphate
  modified_base 4: mod_base = OTHER; note = 2'-O-methylcytidine-3'-phosphate
  modified_base 6: mod_base = OTHER; note = 2'-O-methyluridine-3'-phosphate
  modified_base 7: mod_base = OTHER; note = cytidine-2'-phosphate
  modified_base 8: mod_base = OTHER; note = 2'-O-methyluridine-3'-phosphate
  modified_base 9: mod_base = OTHER; note = 2'-O-methyladenosine-3'-phosphate
  modified_base 10: mod_base = OTHER; note = 2'-O-methyluridine-3'-phosphate
  modified_base 11: mod_base = OTHER; note = 2'-O-methyladenosine-3'-phosphate
  modified_base 12: mod_base = OTHER; note = 2'-O-methylcytidine-3'-phosphate
  modified_base 13: mod_base = OTHER; note = 2'-O-methylcytidine-3'-phosphate
  modified_base 14: mod_base = OTHER; note = 2'-fluoroadenosine-3'-phosphate
  modified_base 15: mod_base = OTHER; note = 2'-O-methylcytidine-3'-phosphate
  modified_base 16: mod_base = OTHER; note = 2'-fluorocytidine-3'-phosphate
  modified_base 17: mod_base = OTHER; note = 2'-O-methylcytidine-3'-phosphate
  modified_base 18: mod_base = OTHER; note = 2'-O-methyladenosine-3'-phosphate
  modified_base 19: mod_base = OTHER; note = 2'-O-methylcytidine-3'-phosphate
  modified_base 20: mod_base = OTHER; note = 2'-O-methyluridine-3'-phosphate
  modified_base 21: mod_base = OTHER; note = 2'-O-methyluridine-3'-phosphorothioate
  modified_base 22: mod_base = OTHER; note = 2'-O-methylguanosine-3'-phosphorothioate
  modified_base 23: mod_base = OTHER; note = 2'-O-methylguanosine-3'-phosphate
  misc_feature 1..4: note = RNA
  misc_feature 5: note = DNA
  misc_feature 6..23: note = RNA
tagcctctataccacccacttgg

SEQ ID NO: 1269 - DNA, 23 bp, synthetic construct
  source 1..23: mol_type = other DNA
  modified_base 1: mod_base = OTHER; note = Vinyl-phosphonate-2'-O-methyluridine-3'-phosphate
  modified_base 2: mod_base = OTHER; note = 2'-fluoroadenosine-3'-phosphate
  modified_base 3: mod_base = OTHER; note = 2'-O-methyladenosine-3'-phosphate
  modified_base 4: mod_base = OTHER; note = 2'-O-methylguanosine-3'-phosphate
  modified_base 6: mod_base = OTHER; note = 2'-O-methylguanosine-3'-phosphate
  modified_base 7: mod_base = OTHER; note = cytidine-2'-phosphate
  modified_base 8: mod_base = OTHER; note = 2'-O-methylcytidine-3'-phosphate
  modified_base 9: mod_base = OTHER; note = 2'-O-methyluridine-3'-phosphate
  modified_base 10: mod_base = OTHER; note = 2'-O-methylcytidine-3'-phosphate
  modified_base 11: mod_base = OTHER; note = 2'-O-methyluridine-3'-phosphate
  modified_base 12: mod_base = OTHER; note = 2'-O-methyladenosine-3'-phosphate
  modified_base 13: mod_base = OTHER; note = 2'-O-methyluridine-3'-phosphate
  modified_base 14: mod_base = OTHER; note = 2'-fluoroadenosine-3'-phosphate
  modified_base 15: mod_base = OTHER; note = 2'-O-methylcytidine-3'-phosphate
  modified_base 16: mod_base = OTHER; note = 2'-fluorocytidine-3'-phosphate
  modified_base 17: mod_base = OTHER; note = 2'-O-methyladenosine-3'-phosphate
  modified_base 18: mod_base = OTHER; note = 2'-O-methylcytidine-3'-phosphate
  modified_base 19: mod_base = OTHER; note = 2'-O-methylcytidine-3'-phosphate
  modified_base 20: mod_base = OTHER; note = 2'-O-methylcytidine-3'-phosphate
  modified_base 21: mod_base = OTHER; note = 2'-O-methyladenosine-3'-phosphorothioate
  modified_base 22: mod_base = OTHER; note = 2'-O-methylcytidine-3'-phosphorothioate
  modified_base 23: mod_base = OTHER; note = 2'-O-methyluridine-3'-phosphate
  misc_feature 1..4: note = RNA
  misc_feature 5: note = DNA
  misc_feature 6..23: note = RNA
taagagcctctataccacccact

SEQ ID NO: 1270 - DNA, 23 bp, synthetic construct
  source 1..23: mol_type = other DNA
  modified_base 1: mod_base = OTHER; note = Vinyl-phosphonate-2'-O-methyluridine-3'-phosphate
  modified_base 2: mod_base = OTHER; note = 2'-fluoroadenosine-3'-phosphate
  modified_base 3: mod_base = OTHER; note = 2'-O-methyladenosine-3'-phosphate
  modified_base 4: mod_base = OTHER; note = 2'-O-methylguanosine-3'-phosphate
  modified_base 6: mod_base = OTHER; note = 2'-O-methylguanosine-3'-phosphate
  modified_base 7: mod_base = OTHER; note = cytidine-2'-phosphate
  modified_base 8: mod_base = OTHER; note = 2'-O-methyladenosine-3'-phosphate
  modified_base 9: mod_base = OTHER; note = 2'-O-methylcytidine-3'-phosphate
  modified_base 10: mod_base = OTHER; note = 2'-O-methyladenosine-3'-phosphate
  modified_base 11: mod_base = OTHER; note = 2'-O-methylguanosine-3'-phosphate
  modified_base 12: mod_base = OTHER; note = 2'-O-methyladenosine-3'-phosphate
  modified_base 13: mod_base = OTHER; note = 2'-O-methyluridine-3'-phosphate
  modified_base 14: mod_base = OTHER; note = 2'-fluoroguanosine-3'-phosphate
  modified_base 15: mod_base = OTHER; note = 2'-O-methylguanosine-3'-phosphate
  modified_base 16: mod_base = OTHER; note = 2'-fluorocytidine-3'-phosphate
  modified_base 17: mod_base = OTHER; note = 2'-O-methyladenosine-3'-phosphate
  modified_base 18: mod_base = OTHER; note = 2'-O-methylguanosine-3'-phosphate
  modified_base 19: mod_base = OTHER; note = 2'-O-methylguanosine-3'-phosphate
  modified_base 20: mod_base = OTHER; note = 2'-O-methylcytidine-3'-phosphate
  modified_base 21: mod_base = OTHER; note = 2'-O-methyluridine-3'-phosphorothioate
  modified_base 22: mod_base = OTHER; note = 2'-O-methylcytidine-3'-phosphorothioate
  modified_base 23: mod_base = OTHER; note = 2'-O-methyladenosine-3'-phosphate
  misc_feature 1..4: note = RNA
  misc_feature 5: note = DNA
  misc_feature 6..23: note = RNA
taagagcacagatggcaggctca

SEQ ID NO: 1271 - DNA, 23 bp, synthetic construct
  source 1..23: mol_type = other DNA
  modified_base 1: mod_base = OTHER; note = Vinyl-phosphonate-2'-O-methyluridine-3'-phosphate
  modified_base 2: mod_base = OTHER; note = 2'-fluoroguanosine-3'-phosphate
  modified_base 3: mod_base = OTHER; note = 2'-O-methyladenosine-3'-phosphate
  modified_base 4: mod_base = OTHER; note = 2'-O-methyladenosine-3'-phosphate
  modified_base 6: mod_base = OTHER; note = 2'-O-methyladenosine-3'-phosphate
  modified_base 7: mod_base = OTHER; note = guanosine-2'-phosphate
  modified_base 8: mod_base = OTHER; note = 2'-O-methylcytidine-3'-phosphate
  modified_base 9: mod_base = OTHER; note = 2'-O-methyladenosine-3'-phosphate
  modified_base 10: mod_base = OTHER; note = 2'-O-methylcytidine-3'-phosphate
  modified_base 11: mod_base = OTHER; note = 2'-O-methyladenosine-3'-phosphate
  modified_base 12: mod_base = OTHER; note = 2'-O-methylguanosine-3'-phosphate
  modified_base 13: mod_base = OTHER; note = 2'-O-methyladenosine-3'-phosphate
  modified_base 14: mod_base = OTHER; note = 2'-fluorouridine-3'-phosphate
  modified_base 15: mod_base = OTHER; note = 2'-O-methylguanosine-3'-phosphate
  modified_base 16: mod_base = OTHER; note = 2'-fluoroguanosine-3'-phosphate
  modified_base 17: mod_base = OTHER; note = 2'-O-methylcytidine-3'-phosphate
  modified_base 18: mod_base = OTHER; note = 2'-O-methyladenosine-3'-phosphate
  modified_base 19: mod_base = OTHER; note = 2'-O-methylguanosine-3'-phosphate
  modified_base 20: mod_base = OTHER; note = 2'-O-methylguanosine-3'-phosphate
  modified_base 21: mod_base = OTHER; note = 2'-O-methylcytidine-3'-phosphorothioate
  modified_base 22: mod_base = OTHER; note = 2'-O-methyluridine-3'-phosphorothioate
  modified_base 23: mod_base = OTHER; note = 2'-O-methylcytidine-3'-phosphate
  misc_feature 1..4: note = RNA
  misc_feature 5: note = DNA
  misc_feature 6..23: note = RNA
tgaagagcacagatggcaggctc

SEQ ID NO: 1272 - DNA, 23 bp, synthetic construct
  source 1..23: mol_type = other DNA
  modified_base 1: mod_base = OTHER; note = Vinyl-phosphonate-2'-O-methyluridine-3'-phosphate
  modified_base 2: mod_base = OTHER; note = 2'-fluoroguanosine-3'-phosphate
  modified_base 3: mod_base = OTHER; note = 2'-O-methyladenosine-3'-phosphate
  modified_base 4: mod_base = OTHER; note = 2'-O-methyluridine-3'-phosphate
  modified_base 6: mod_base = OTHER; note = 2'-O-methyladenosine-3'-phosphate
  modified_base 7: mod_base = OTHER; note = cytidine-2'-phosphate
  modified_base 8: mod_base = OTHER; note = 2'-O-methylguanosine-3'-phosphate
  modified_base 9: mod_base = OTHER; note = 2'-O-methyladenosine-3'-phosphate
  modified_base 10: mod_base = OTHER; note = 2'-O-methyladenosine-3'-phosphate
  modified_base 11: mod_base = OTHER; note = 2'-O-methylguanosine-3'-phosphate
  modified_base 12: mod_base = OTHER; note = 2'-O-methyladenosine-3'-phosphate
  modified_base 13: mod_base = OTHER; note = 2'-O-methylguanosine-3'-phosphate
  modified_base 14: mod_base = OTHER; note = 2'-fluorocytidine-3'-phosphate
  modified_base 15: mod_base = OTHER; note = 2'-O-methyladenosine-3'-phosphate
  modified_base 16: mod_base = OTHER; note = 2'-fluorocytidine-3'-phosphate
  modified_base 17: mod_base = OTHER; note = 2'-O-methyladenosine-3'-phosphate
  modified_base 18: mod_base = OTHER; note = 2'-O-methylguanosine-3'-phosphate
  modified_base 19: mod_base = OTHER; note = 2'-O-methyladenosine-3'-phosphate
  modified_base 20: mod_base = OTHER; note = 2'-O-methyluridine-3'-phosphate
  modified_base 21: mod_base = OTHER; note = 2'-O-methylguanosine-3'-phosphorothioate
  modified_base 22: mod_base = OTHER; note = 2'-O-methylguanosine-3'-phosphorothioate
  modified_base 23: mod_base = OTHER; note = 2'-O-methylcytidine-3'-phosphate
  misc_feature 1..4: note = RNA
  misc_feature 5: note = DNA
  misc_feature 6..23: note = RNA
tgatgacgaagagcacagatggc

SEQ ID NO: 1273 - DNA, 23 bp, synthetic construct
  source 1..23: mol_type = other DNA
  modified_base 1: mod_base = OTHER; note = Vinyl-phosphonate-2'-O-methyluridine-3'-phosphate
  modified_base 2: mod_base = OTHER; note = 2'-fluorocytidine-3'-phosphate
  modified_base 3: mod_base = OTHER; note = 2'-O-methyluridine-3'-phosphate
  modified_base 4: mod_base = OTHER; note = 2'-O-methylguanosine-3'-phosphate
  modified_base 6: mod_base = OTHER; note = 2'-O-methyluridine-3'-phosphate
  modified_base 7: mod_base = OTHER; note = cytidine-2'-phosphate
  modified_base 8: mod_base = OTHER; note = 2'-O-methyladenosine-3'-phosphate
  modified_base 9: mod_base = OTHER; note = 2'-O-methylguanosine-3'-phosphate
  modified_base 10: mod_base = OTHER; note = 2'-O-methyladenosine-3'-phosphate
  modified_base 11: mod_base = OTHER; note = 2'-O-methyluridine-3'-phosphate
  modified_base 12: mod_base = OTHER; note = 2'-O-methylguanosine-3'-phosphate
  modified_base 13: mod_base = OTHER; note = 2'-O-methyladenosine-3'-phosphate
  modified_base 14: mod_base = OTHER; note = 2'-fluorocytidine-3'-phosphate
  modified_base 15: mod_base = OTHER; note = 2'-O-methylguanosine-3'-phosphate
  modified_base 16: mod_base = OTHER; note = 2'-fluoroadenosine-3'-phosphate
  modified_base 17: mod_base = OTHER; note = 2'-O-methyladenosine-3'-phosphate
  modified_base 18: mod_base = OTHER; note = 2'-O-methylguanosine-3'-phosphate
  modified_base 19: mod_base = OTHER; note = 2'-O-methyladenosine-3'-phosphate
  modified_base 20: mod_base = OTHER; note = 2'-O-methylguanosine-3'-phosphate
  modified_base 21: mod_base = OTHER; note = 2'-O-methylcytidine-3'-phosphorothioate
  modified_base 22: mod_base = OTHER; note = 2'-O-methyladenosine-3'-phosphorothioate
  modified_base 23: mod_base = OTHER; note = 2'-O-methylcytidine-3'-phosphate
  misc_feature 1..4: note = RNA
  misc_feature 5: note = DNA
  misc_feature 6..23: note = RNA
tctggtcagatgacgaagagcac

SEQ ID NO: 1274 - DNA, 23 bp, synthetic construct
  source 1..23: mol_type = other DNA
  modified_base 1: mod_base = OTHER; note = Vinyl-phosphonate-2'-O-methyluridine-3'-phosphate
  modified_base 2: mod_base = OTHER; note = 2'-fluoroadenosine-3'-phosphate
  modified_base 3: mod_base = OTHER; note = 2'-O-methyluridine-3'-phosphate
  modified_base 4: mod_base = OTHER; note = 2'-O-methyladenosine-3'-phosphate
  modified_base 6: mod_base = OTHER; note = 2'-O-methyluridine-3'-phosphate
  modified_base 7: mod_base = OTHER; note = guanosine-2'-phosphate
  modified_base 8: mod_base = OTHER; note = 2'-O-methyladenosine-3'-phosphate
  modified_base 9: mod_base = OTHER; note = 2'-O-methyladenosine-3'-phosphate
  modified_base 10: mod_base = OTHER; note = 2'-O-methylguanosine-3'-phosphate
  modified_base 11: mod_base = OTHER; note = 2'-O-methylguanosine-3'-phosphate
  modified_base 12: mod_base = OTHER; note = 2'-O-methylcytidine-3'-phosphate
  modified_base 13: mod_base = OTHER; note = 2'-O-methylguanosine-3'-phosphate
  modified_base 14: mod_base = OTHER; note = 2'-fluoroadenosine-3'-phosphate
  modified_base 15: mod_base = OTHER; note = 2'-O-methyladenosine-3'-phosphate
  modified_base 16: mod_base = OTHER; note = 2'-fluorocytidine-3'-phosphate
  modified_base 17: mod_base = OTHER; note = 2'-O-methyluridine-3'-phosphate
  modified_base 18: mod_base = OTHER; note = 2'-O-methylguanosine-3'-phosphate
  modified_base 19: mod_base = OTHER; note = 2'-O-methylcytidine-3'-phosphate
  modified_base 20: mod_base = OTHER; note = 2'-O-methyladenosine-3'-phosphate
  modified_base 21: mod_base = OTHER; note = 2'-O-methyluridine-3'-phosphorothioate
  modified_base 22: mod_base = OTHER; note = 2'-O-methyluridine-3'-phosphorothioate
  modified_base 23: mod_base = OTHER; note = 2'-O-methylcytidine-3'-phosphate
  misc_feature 1..4: note = RNA
  misc_feature 5: note = DNA
  misc_feature 6..23: note = RNA
tatagtgaaggcgaactgcattc

SEQ ID NO: 1275 - DNA, 23 bp, synthetic construct
  source 1..23: mol_type = other DNA
  modified_base 1: mod_base = OTHER; note = Vinyl-phosphonate-2'-O-methyluridine-3'-phosphate
  modified_base 2: mod_base = OTHER; note = 2'-fluorouridine-3'-phosphate
  modified_base 3: mod_base = OTHER; note = 2'-O-methylguanosine-3'-phosphate
  modified_base 4: mod_base = OTHER; note = 2'-O-methylguanosine-3'-phosphate
  modified_base 6: mod_base = OTHER; note = 2'-O-methyluridine-3'-phosphate
  modified_base 7: mod_base = OTHER; note = guanosine-2'-phosphate
  modified_base 8: mod_base = OTHER; note = 2'-O-methyluridine-3'-phosphate
  modified_base 9: mod_base = OTHER; note = 2'-O-methyladenosine-3'-phosphate
  modified_base 10: mod_base = OTHER; note = 2'-O-methyladenosine-3'-phosphate
  modified_base 11: mod_base = OTHER; note = 2'-O-methylguanosine-3'-phosphate
  modified_base 12: mod_base = OTHER; note = 2'-O-methyladenosine-3'-phosphate
  modified_base 13: mod_base = OTHER; note = 2'-O-methylguanosine-3'-phosphate
  modified_base 14: mod_base = OTHER; note = 2'-fluorocytidine-3'-phosphate
  modified_base 15: mod_base = OTHER; note = 2'-O-methyluridine-3'-phosphate
  modified_base 16: mod_base = OTHER; note = 2'-fluorouridine-3'-phosphate
  modified_base 17: mod_base = OTHER; note = 2'-O-methyladenosine-3'-phosphate
  modified_base 18: mod_base = OTHER; note = 2'-O-methyladenosine-3'-phosphate
  modified_base 19: mod_base = OTHER; note = 2'-O-methylcytidine-3'-phosphate
  modified_base 20: mod_base = OTHER; note = 2'-O-methylcytidine-3'-phosphate
  modified_base 21: mod_base = OTHER; note = 2'-O-methyladenosine-3'-phosphorothioate
  modified_base 22: mod_base = OTHER; note = 2'-O-methylcytidine-3'-phosphorothioate
  modified_base 23: mod_base = OTHER; note = 2'-O-methyladenosine-3'-phosphate
  misc_feature 1..4: note = RNA
  misc_feature 5: note = DNA
  misc_feature 6..23: note = RNA
ttgggtgtaagagcttaaccaca

SEQ ID NO: 1276 - DNA, 23 bp, synthetic construct
  source 1..23: mol_type = other DNA
  modified_base 1: mod_base = OTHER; note = Vinyl-phosphonate-2'-O-methyluridine-3'-phosphate
  modified_base 2: mod_base = OTHER; note = 2'-fluoroadenosine-3'-phosphate
  modified_base 3: mod_base = OTHER; note = 2'-O-methyluridine-3'-phosphate
  modified_base 4: mod_base = OTHER; note = 2'-O-methyluridine-3'-phosphate
  modified_base 6: mod_base = OTHER; note = 2'-O-methylcytidine-3'-phosphate
  modified_base 7: mod_base = OTHER; note = guanosine-2'-phosphate
  modified_base 8: mod_base = OTHER; note = 2'-O-methyladenosine-3'-phosphate
  modified_base 9: mod_base = OTHER; note = 2'-O-methyladenosine-3'-phosphate
  modified_base 10: mod_base = OTHER; note = 2'-O-methyluridine-3'-phosphate
  modified_base 11: mod_base = OTHER; note = 2'-O-methylcytidine-3'-phosphate
  modified_base 12: mod_base = OTHER; note = 2'-O-methyladenosine-3'-phosphate
  modified_base 13: mod_base = OTHER; note = 2'-O-methyladenosine-3'-phosphate
  modified_base 14: mod_base = OTHER; note = 2'-fluorouridine-3'-phosphate
  modified_base 15: mod_base = OTHER; note = 2'-O-methylcytidine-3'-phosphate
  modified_base 16: mod_base = OTHER; note = 2'-fluorocytidine-3'-phosphate
  modified_base 17: mod_base = OTHER; note = 2'-O-methyladenosine-3'-phosphate
  modified_base 18: mod_base = OTHER; note = 2'-O-methyladenosine-3'-phosphate
  modified_base 19: mod_base = OTHER; note = 2'-O-methylcytidine-3'-phosphate
  modified_base 20: mod_base = OTHER; note = 2'-O-methyladenosine-3'-phosphate
  modified_base 21: mod_base = OTHER; note = 2'-O-methylguanosine-3'-phosphorothioate
  modified_base 22: mod_base = OTHER; note = 2'-O-methyluridine-3'-phosphorothioate
  modified_base 23: mod_base = OTHER; note = 2'-O-methyladenosine-3'-phosphate
  misc_feature 1..4: note = RNA
  misc_feature 5: note = DNA
  misc_feature 6..23: note = RNA
tatttcgaatcaatccaacagta

SEQ ID NO: 1277 - DNA, 23 bp, synthetic construct
  source 1..23: mol_type = other DNA
  modified_base 1: mod_base = OTHER; note = Vinyl-phosphonate-2'-O-methyluridine-3'-phosphate
  modified_base 2: mod_base = OTHER; note = 2'-fluoroguanosine-3'-phosphate
  modified_base 3: mod_base = OTHER; note = 2'-O-methyladenosine-3'-phosphate
  modified_base 4: mod_base = OTHER; note = 2'-O-methyluridine-3'-phosphate
  modified_base 6: mod_base = OTHER; note = 2'-O-methyluridine-3'-phosphate
  modified_base 7: mod_base = OTHER; note = cytidine-2'-phosphate
  modified_base 8: mod_base = OTHER; note = 2'-O-methylguanosine-3'-phosphate
  modified_base 9: mod_base = OTHER; note = 2'-O-methyladenosine-3'-phosphate
  modified_base 10: mod_base = OTHER; note = 2'-O-methyladenosine-3'-phosphate
  modified_base 11: mod_base = OTHER; note = 2'-O-methyluridine-3'-phosphate
  modified_base 12: mod_base = OTHER; note = 2'-O-methylcytidine-3'-phosphate
  modified_base 13: mod_base = OTHER; note = 2'-O-methyladenosine-3'-phosphate
  modified_base 14: mod_base = OTHER; note = 2'-fluoroadenosine-3'-phosphate
  modified_base 15: mod_base = OTHER; note = 2'-O-methyluridine-3'-phosphate
  modified_base 16: mod_base = OTHER; note = 2'-fluorocytidine-3'-phosphate
  modified_base 17: mod_base = OTHER; note = 2'-O-methylcytidine-3'-phosphate
  modified_base 18: mod_base = OTHER; note = 2'-O-methyladenosine-3'-phosphate
  modified_base 19: mod_base = OTHER; note = 2'-O-methyladenosine-3'-phosphate
  modified_base 20: mod_base = OTHER; note = 2'-O-methylcytidine-3'-phosphate
  modified_base 21: mod_base = OTHER; note = 2'-O-methyladenosine-3'-phosphorothioate
  modified_base 22: mod_base = OTHER; note = 2'-O-methylguanosine-3'-phosphorothioate
  modified_base 23: mod_base = OTHER; note = 2'-O-methyluridine-3'-phosphate
  misc_feature 1..4: note = RNA
  misc_feature 5: note = DNA
  misc_feature 6..23: note = RNA
tgatttcgaatcaatccaacagt

SEQ ID NO: 1278 - DNA, 23 bp, synthetic construct
  source 1..23: mol_type = other DNA
  modified_base 1: mod_base = OTHER; note = Vinyl-phosphonate-2'-O-methyluridine-3'-phosphate
  modified_base 2: mod_base = OTHER; note = 2'-fluoroguanosine-3'-phosphate
  modified_base 3: mod_base = OTHER; note = 2'-O-methylguanosine-3'-phosphate
  modified_base 4: mod_base = OTHER; note = 2'-O-methyladenosine-3'-phosphate
  modified_base 6: mod_base = OTHER; note = 2'-O-methyluridine-3'-phosphate
  modified_base 7: mod_base = OTHER; note = guanosine-2'-phosphate
  modified_base 8: mod_base = OTHER; note = 2'-O-methylguanosine-3'-phosphate
  modified_base 9: mod_base = OTHER; note = 2'-O-methylcytidine-3'-phosphate
  modified_base 10: mod_base = OTHER; note = 2'-O-methyladenosine-3'-phosphate
  modified_base 11: mod_base = OTHER; note = 2'-O-methylcytidine-3'-phosphate
  modified_base 12: mod_base = OTHER; note = 2'-O-methylcytidine-3'-phosphate
  modified_base 13: mod_base = OTHER; note = 2'-O-methylcytidine-3'-phosphate
  modified_base 14: mod_base = OTHER; note = 2'-fluorouridine-3'-phosphate
  modified_base 15: mod_base = OTHER; note = 2'-O-methylguanosine-3'-phosphate
  modified_base 16: mod_base = OTHER; note = 2'-fluorocytidine-3'-phosphate
  modified_base 17: mod_base = OTHER; note = 2'-O-methyluridine-3'-phosphate
  modified_base 18: mod_base = OTHER; note = 2'-O-methylcytidine-3'-phosphate
  modified_base 19: mod_base = OTHER; note = 2'-O-methyladenosine-3'-phosphate
  modified_base 20: mod_base = OTHER; note = 2'-O-methylcytidine-3'-phosphate
  modified_base 21: mod_base = OTHER; note = 2'-O-methylguanosine-3'-phosphorothioate
  modified_base 22: mod_base = OTHER; note = 2'-O-methylcytidine-3'-phosphorothioate
  modified_base 23: mod_base = OTHER; note = 2'-O-methyladenosine-3'-phosphate
  misc_feature 1..4: note = RNA
  misc_feature 5: note = DNA
  misc_feature 6..23: note = RNA
tggaatggcaccctgctcacgca

SEQ ID NO: 1279 - DNA, 23 bp, synthetic construct
  source 1..23: mol_type = other DNA
  modified_base 1: mod_base = OTHER; note = Vinyl-phosphonate-2'-O-methyluridine-3'-phosphate
  modified_base 2: mod_base = OTHER; note = 2'-fluoroadenosine-3'-phosphate
  modified_base 3: mod_base = OTHER; note = 2'-O-methylguanosine-3'-phosphate
  modified_base 4: mod_base = OTHER; note = 2'-O-methylcytidine-3'-phosphate
  modified_base 6: mod_base = OTHER; note = 2'-O-methyladenosine-3'-phosphate
  modified_base 7: mod_base = OTHER; note = cytidine-2'-phosphate
  modified_base 8: mod_base = OTHER; note = 2'-O-methyluridine-3'-phosphate
  modified_base 9: mod_base = OTHER; note = 2'-O-methylguanosine-3'-phosphate
  modified_base 10: mod_base = OTHER; note = 2'-O-methyladenosine-3'-phosphate
  modified_base 11: mod_base = OTHER; note = 2'-O-methyladenosine-3'-phosphate
  modified_base 12: mod_base = OTHER; note = 2'-O-methylcytidine-3'-phosphate
  modified_base 13: mod_base = OTHER; note = 2'-O-methyluridine-3'-phosphate
  modified_base 14: mod_base = OTHER; note = 2'-fluoroadenosine-3'-phosphate
  modified_base 15: mod_base = OTHER; note = 2'-O-methylguanosine-3'-phosphate
  modified_base 16: mod_base = OTHER; note = 2'-fluorouridine-3'-phosphate
  modified_base 17: mod_base = OTHER; note = 2'-O-methylcytidine-3'-phosphate
  modified_base 18: mod_base = OTHER; note = 2'-O-methylguanosine-3'-phosphate
  modified_base 19: mod_base = OTHER; note = 2'-O-methyluridine-3'-phosphate
  modified_base 20: mod_base = OTHER; note = 2'-O-methylguanosine-3'-phosphate
  modified_base 21: mod_base = OTHER; note = 2'-O-methylguanosine-3'-phosphorothioate
  modified_base 22: mod_base = OTHER; note = 2'-O-methyladenosine-3'-phosphorothioate
  modified_base 23: mod_base = OTHER; note = 2'-O-methyladenosine-3'-phosphate
  misc_feature 1..4: note = RNA
  misc_feature 5: note = DNA
  misc_feature 6..23: note = RNA
tagcaactgaactagtcgtggaa

SEQ ID NO: 1280 - DNA, 23 bp, synthetic construct
  source 1..23: mol_type = other DNA
  modified_base 1: mod_base = OTHER; note = Vinyl-phosphonate-2'-O-methyluridine-3'-phosphate
  modified_base 2: mod_base = OTHER; note = 2'-fluorouridine-3'-phosphate
  modified_base 3: mod_base = OTHER; note = 2'-O-methylguanosine-3'-phosphate
  modified_base 4: mod_base = OTHER; note = 2'-O-methylcytidine-3'-phosphate
  modified_base 6: mod_base = OTHER; note = 2'-O-methylcytidine-3'-phosphate
  modified_base 7: mod_base = OTHER; note = guanosine-2'-phosphate
  modified_base 8: mod_base = OTHER; note = 2'-O-methyladenosine-3'-phosphate
  modified_base 9: mod_base = OTHER; note = 2'-O-methyladenosine-3'-phosphate
  modified_base 10: mod_base = OTHER; note = 2'-O-methylcytidine-3'-phosphate
  modified_base 11: mod_base = OTHER; note = 2'-O-methyladenosine-3'-phosphate
  modified_base 12: mod_base = OTHER; note = 2'-O-methyladenosine-3'-phosphate
  modified_base 13: mod_base = OTHER; note = 2'-O-methylguanosine-3'-phosphate
  modified_base 14: mod_base = OTHER; note = 2'-fluorocytidine-3'-phosphate
  modified_base 15: mod_base = OTHER; note = 2'-O-methyladenosine-3'-phosphate
  modified_base 16: mod_base = OTHER; note = 2'-fluoroadenosine-3'-phosphate
  modified_base 17: mod_base = OTHER; note = 2'-O-methylcytidine-3'-phosphate
  modified_base 18: mod_base = OTHER; note = 2'-O-methyluridine-3'-phosphate
  modified_base 19: mod_base = OTHER; note = 2'-O-methylguanosine-3'-phosphate
  modified_base 20: mod_base = OTHER; note = 2'-O-methyladenosine-3'-phosphate
  modified_base 21: mod_base = OTHER; note = 2'-O-methyladenosine-3'-phosphorothioate
  modified_base 22: mod_base = OTHER; note = 2'-O-methylcytidine-3'-phosphorothioate
  modified_base 23: mod_base = OTHER; note = 2'-O-methyluridine-3'-phosphate
  misc_feature 1..4: note = RNA
  misc_feature 5: note = DNA
  misc_feature 6..23: note = RNA
ttgcacgaacaagcaactgaact

SEQ ID NO: 1281 - DNA, 23 bp, synthetic construct
  source 1..23: mol_type = other DNA
  modified_base 1: mod_base = OTHER; note = Vinyl-phosphonate-2'-O-methyluridine-3'-phosphate
  modified_base 2: mod_base = OTHER; note = 2'-fluoroguanosine-3'-phosphate
  modified_base 3: mod_base = OTHER; note = 2'-O-methyluridine-3'-phosphate
  modified_base 4: mod_base = OTHER; note = 2'-O-methylguanosine-3'-phosphate
  modified_base 6: mod_base = OTHER; note = 2'-O-methyladenosine-3'-phosphate
  modified_base 7: mod_base = OTHER; note = cytidine-2'-phosphate
  modified_base 8: mod_base = OTHER; note = 2'-O-methylguanosine-3'-phosphate
  modified_base 9: mod_base = OTHER; note = 2'-O-methyladenosine-3'-phosphate
  modified_base 10: mod_base = OTHER; note = 2'-O-methyladenosine-3'-phosphate
  modified_base 11: mod_base = OTHER; note = 2'-O-methylcytidine-3'-phosphate
  modified_base 12: mod_base = OTHER; note = 2'-O-methyladenosine-3'-phosphate
  modified_base 13: mod_base = OTHER; note = 2'-O-methyladenosine-3'-phosphate
  modified_base 14: mod_base = OTHER; note = 2'-fluoroguanosine-3'-phosphate
  modified_base 15: mod_base = OTHER; note = 2'-O-methylcytidine-3'-phosphate
  modified_base 16: mod_base = OTHER; note = 2'-fluoroadenosine-3'-phosphate
  modified_base 17: mod_base = OTHER; note = 2'-O-methyladenosine-3'-phosphate
  modified_base 18: mod_base = OTHER; note = 2'-O-methylcytidine-3'-phosphate
  modified_base 19: mod_base = OTHER; note = 2'-O-methyluridine-3'-phosphate
  modified_base 20: mod_base = OTHER; note = 2'-O-methylguanosine-3'-phosphate
  modified_base 21: mod_base = OTHER; note = 2'-O-methyladenosine-3'-phosphorothioate
  modified_base 22: mod_base = OTHER; note = 2'-O-methyladenosine-3'-phosphorothioate
  modified_base 23: mod_base = OTHER; note = 2'-O-methylcytidine-3'-phosphate
  misc_feature 1..4: note = RNA
  misc_feature 5: note = DNA
  misc_feature 6..23: note = RNA
tgtgcacgaacaagcaactgaac

SEQ ID NO: 1282 - DNA, 23 bp, synthetic construct
  source 1..23: mol_type = other DNA
  modified_base 1: mod_base = OTHER; note = Vinyl-phosphonate-2'-O-methyluridine-3'-phosphate
  modified_base 2: mod_base = OTHER; note = 2'-fluoroadenosine-3'-phosphate
  modified_base 3: mod_base = OTHER; note = 2'-O-methyluridine-3'-phosphate
  modified_base 4: mod_base = OTHER; note = 2'-O-methylguanosine-3'-phosphate
  modified_base 6: mod_base = OTHER; note = 2'-O-methylguanosine-3'-phosphate
  modified_base 7: mod_base = OTHER; note = cytidine-2'-phosphate
  modified_base 8: mod_base = OTHER; note = 2'-O-methyladenosine-3'-phosphate
  modified_base 9: mod_base = OTHER; note = 2'-O-methylcytidine-3'-phosphate
  modified_base 10: mod_base = OTHER; note = 2'-O-methylguanosine-3'-phosphate
  modified_base 11: mod_base = OTHER; note = 2'-O-methyladenosine-3'-phosphate
  modified_base 12: mod_base = OTHER; note = 2'-O-methyladenosine-3'-phosphate
  modified_base 13: mod_base = OTHER; note = 2'-O-methylcytidine-3'-phosphate
  modified_base 14: mod_base = OTHER; note = 2'-fluoroadenosine-3'-phosphate
  modified_base 15: mod_base = OTHER; note = 2'-O-methyladenosine-3'-phosphate
  modified_base 16: mod_base = OTHER; note = 2'-fluoroguanosine-3'-phosphate
  modified_base 17: mod_base = OTHER; note = 2'-O-methylcytidine-3'-phosphate
  modified_base 18: mod_base = OTHER; note = 2'-O-methyladenosine-3'-phosphate
  modified_base 19: mod_base = OTHER; note = 2'-O-methyladenosine-3'-phosphate
  modified_base 20: mod_base = OTHER; note = 2'-O-methylcytidine-3'-phosphate
  modified_base 21: mod_base = OTHER; note = 2'-O-methyluridine-3'-phosphorothioate
  modified_base 22: mod_base = OTHER; note = 2'-O-methylguanosine-3'-phosphorothioate
  modified_base 23: mod_base = OTHER; note = 2'-O-methyladenosine-3'-phosphate
  misc_feature 1..4: note = RNA
  misc_feature 5: note = DNA
  misc_feature 6..23: note = RNA
tatgtgcacgaacaagcaactga

SEQ ID NO: 1283 - DNA, 23 bp, synthetic construct
  source 1..23: mol_type = other DNA
  modified_base 1: mod_base = OTHER; note = Vinyl-phosphonate-2'-O-methyluridine-3'-phosphate
  modified_base 2: mod_base = OTHER; note = 2'-fluoroguanosine-3'-phosphate
  modified_base 3: mod_base = OTHER; note = 2'-O-methyladenosine-3'-phosphate
  modified_base 4: mod_base = OTHER; note = 2'-O-methyladenosine-3'-phosphate
  modified_base 6: mod_base = OTHER; note = 2'-O-methylguanosine-3'-phosphate
  modified_base 7: mod_base = OTHER; note = guanosine-2'-phosphate
  modified_base 8: mod_base = OTHER; note = 2'-O-methyluridine-3'-phosphate
  modified_base 9: mod_base = OTHER; note = 2'-O-methyladenosine-3'-phosphate
  modified_base 10: mod_base = OTHER; note = 2'-O-methyluridine-3'-phosphate
  modified_base 11: mod_base = OTHER; note = 2'-O-methyluridine-3'-phosphate
  modified_base 12: mod_base = OTHER; note = 2'-O-methyluridine-3'-phosphate
  modified_base 13: mod_base = OTHER; note = 2'-O-methyladenosine-3'-phosphate
  modified_base 14: mod_base = OTHER; note = 2'-fluoroguanosine-3'-phosphate
  modified_base 15: mod_base = OTHER; note = 2'-O-methyluridine-3'-phosphate
  modified_base 16: mod_base = OTHER; note = 2'-fluorocytidine-3'-phosphate
  modified_base 17: mod_base = OTHER; note = 2'-O-methylcytidine-3'-phosphate
  modified_base 18: mod_base = OTHER; note = 2'-O-methyluridine-3'-phosphate
  modified_base 19: mod_base = OTHER; note = 2'-O-methylcytidine-3'-phosphate
  modified_base 20: mod_base = OTHER; note = 2'-O-methyluridine-3'-phosphate
  modified_base 21: mod_base = OTHER; note = 2'-O-methylguanosine-3'-phosphorothioate
  modified_base 22: mod_base = OTHER; note = 2'-O-methyladenosine-3'-phosphorothioate
  modified_base 23: mod_base = OTHER; note = 2'-O-methyluridine-3'-phosphate
  misc_feature 1..4: note = RNA
  misc_feature 5: note = DNA
  misc_feature 6..23: note = RNA
tgaatggtatttagtcctctgat

SEQ ID NO: 1284 - DNA, 23 bp, synthetic construct
  source 1..23: mol_type = other DNA
  modified_base 1: mod_base = OTHER; note = Vinyl-phosphonate-2'-O-methyluridine-3'-phosphate
  modified_base 2: mod_base = OTHER; note = 2'-fluorocytidine-3'-phosphate
  modified_base 3: mod_base = OTHER; note = 2'-O-methyladenosine-3'-phosphate
  modified_base 4: mod_base = OTHER; note = 2'-O-methyladenosine-3'-phosphate
  modified_base 6: mod_base = OTHER; note = 2'-O-methylguanosine-3'-phosphate
  modified_base 7: mod_base = OTHER; note = guanosine-2'-phosphate
  modified_base 8: mod_base = OTHER; note = 2'-O-methyladenosine-3'-phosphate
  modified_base 9: mod_base = OTHER; note = 2'-O-methyladenosine-3'-phosphate
  modified_base 10: mod_base = OTHER; note = 2'-O-methyluridine-3'-phosphate
  modified_base 11: mod_base = OTHER; note = 2'-O-methylguanosine-3'-phosphate
  modified_base 12: mod_base = OTHER; note = 2'-O-methylguanosine-3'-phosphate
  modified_base 13: mod_base = OTHER; note = 2'-O-methyluridine-3'-phosphate
  modified_base 14: mod_base = OTHER; note = 2'-fluoroadenosine-3'-phosphate
  modified_base 15: mod_base = OTHER; note = 2'-O-methyluridine-3'-phosphate
  modified_base 16: mod_base = OTHER; note = 2'-fluorouridine-3'-phosphate
  modified_base 17: mod_base = OTHER; note = 2'-O-methyluridine-3'-phosphate
  modified_base 18: mod_base = OTHER; note = 2'-O-methyladenosine-3'-phosphate
  modified_base 19: mod_base = OTHER; note = 2'-O-methylguanosine-3'-phosphate
  modified_base 20: mod_base = OTHER; note = 2'-O-methyluridine-3'-phosphate
  modified_base 21: mod_base = OTHER; note = 2'-O-methylcytidine-3'-phosphorothioate
  modified_base 22: mod_base = OTHER; note = 2'-O-methylcytidine-3'-phosphorothioate
  modified_base 23: mod_base = OTHER; note = 2'-O-methyluridine-3'-phosphate
  misc_feature 1..4: note = RNA
  misc_feature 5: note = DNA
  misc_feature 6..23: note = RNA
tcaatggaatggtatttagtcct

SEQ ID NO: 1285 - DNA, 23 bp, synthetic construct
  source 1..23: mol_type = other DNA
  modified_base 1: mod_base = OTHER; note = Vinyl-phosphonate-2'-O-methyluridine-3'-phosphate
  modified_base 2: mod_base = OTHER; note = 2'-fluorocytidine-3'-phosphate
  modified_base 3: mod_base = OTHER; note = 2'-O-methyluridine-3'-phosphate
  modified_base 4: mod_base = OTHER; note = 2'-O-methylguanosine-3'-phosphate
  modified_base 6: mod_base = OTHER; note = 2'-O-methyladenosine-3'-phosphate
  modified_base 7: mod_base = OTHER; note = cytidine-2'-phosphate
  modified_base 8: mod_base = OTHER; note = 2'-O-methyladenosine-3'-phosphate
  modified_base 9: mod_base = OTHER; note = 2'-O-methyladenosine-3'-phosphate
  modified_base 10: mod_base = OTHER; note = 2'-O-methyladenosine-3'-phosphate
  modified_base 11: mod_base = OTHER; note = 2'-O-methylcytidine-3'-phosphate
  modified_base 12: mod_base = OTHER; note = 2'-O-methyladenosine-3'-phosphate
  modified_base 13: mod_base = OTHER; note = 2'-O-methyladenosine-3'-phosphate
  modified_base 14: mod_base = OTHER; note = 2'-fluorouridine-3'-phosphate
  modified_base 15: mod_base = OTHER; note = 2'-O-methylguanosine-3'-phosphate
  modified_base 16: mod_base = OTHER; note = 2'-fluoroguanosine-3'-phosphate
  modified_base 17: mod_base = OTHER; note = 2'-O-methyladenosine-3'-phosphate
  modified_base 18: mod_base = OTHER; note = 2'-O-methyladenosine-3'-phosphate
  modified_base 19: mod_base = OTHER; note = 2'-O-methyluridine-3'-phosphate
  modified_base 20: mod_base = OTHER; note = 2'-O-methylguanosine-3'-phosphate
  modified_base 21: mod_base = OTHER; note = 2'-O-methylguanosine-3'-phosphorothioate
  modified_base 22: mod_base = OTHER; note = 2'-O-methyluridine-3'-phosphorothioate
  modified_base 23: mod_base = OTHER; note = 2'-O-methyladenosine-3'-phosphate
  misc_feature 1..4: note = RNA
  misc_feature 5: note = DNA
  misc_feature 6..23: note = RNA
tctgcacaaacaatggaatggta

SEQ ID NO: 1286 - DNA, 23 bp, synthetic construct
  source 1..23: mol_type = other DNA
  modified_base 1: mod_base = OTHER; note = Vinyl-phosphonate-2'-O-methyluridine-3'-phosphate
  modified_base 2: mod_base = OTHER; note = 2'-fluoroadenosine-3'-phosphate
  modified_base 3: mod_base = OTHER; note = 2'-O-methylguanosine-3'-phosphate
  modified_base 4: mod_base = OTHER; note = 2'-O-methylcytidine-3'-phosphate
  modified_base 6: mod_base = OTHER; note = 2'-O-methylguanosine-3'-phosphate
  modified_base 7: mod_base = OTHER; note = cytidine-2'-phosphate
  modified_base 8: mod_base = OTHER; note = 2'-O-methyladenosine-3'-phosphate
  modified_base 9: mod_base = OTHER; note = 2'-O-methylcytidine-3'-phosphate
  modified_base 10: mod_base = OTHER; note = 2'-O-methyladenosine-3'-phosphate
  modified_base 11: mod_base = OTHER; note = 2'-O-methyladenosine-3'-phosphate
  modified_base 12: mod_base = OTHER; note = 2'-O-methyladenosine-3'-phosphate
  modified_base 13: mod_base = OTHER; note = 2'-O-methylcytidine-3'-phosphate
  modified_base 14: mod_base = OTHER; note = 2'-fluoroadenosine-3'-phosphate
  modified_base 15: mod_base = OTHER; note = 2'-O-methyladenosine-3'-phosphate
  modified_base 16: mod_base = OTHER; note = 2'-fluorouridine-3'-phosphate
  modified_base 17: mod_base = OTHER; note = 2'-O-methylguanosine-3'-phosphate
  modified_base 18: mod_base = OTHER; note = 2'-O-methylguanosine-3'-phosphate
  modified_base 19: mod_base = OTHER; note = 2'-O-methyladenosine-3'-phosphate
  modified_base 20: mod_base = OTHER; note = 2'-O-methyladenosine-3'-phosphate
  modified_base 21: mod_base = OTHER; note = 2'-O-methyluridine-3'-phosphorothioate
  modified_base 22: mod_base = OTHER; note = 2'-O-methylguanosine-3'-phosphorothioate
  modified_base 23: mod_base = OTHER; note = 2'-O-methylguanosine-3'-phosphate
  misc_feature 1..4: note = RNA
  misc_feature 5: note = DNA
  misc_feature 6..23: note = RNA
tagctgcacaaacaatggaatgg

SEQ ID NO: 1287 - DNA, 23 bp, synthetic construct
  source 1..23: mol_type = other DNA
  modified_base 1: mod_base = OTHER; note = Vinyl-phosphonate-2'-O-methyluridine-3'-phosphate
  modified_base 2: mod_base = OTHER; note = 2'-fluorocytidine-3'-phosphate
  modified_base 3: mod_base = OTHER; note = 2'-O-methyladenosine-3'-phosphate
  modified_base 4: mod_base = OTHER; note = 2'-O-methylguanosine-3'-phosphate
  modified_base 6: mod_base = OTHER; note = 2'-O-methyluridine-3'-phosphate
  modified_base 7: mod_base = OTHER; note = guanosine-2'-phosphate
  modified_base 8: mod_base = OTHER; note = 2'-O-methylcytidine-3'-phosphate
  modified_base 9: mod_base = OTHER; note = 2'-O-methyladenosine-3'-phosphate
  modified_base 10: mod_base = OTHER; note = 2'-O-methylcytidine-3'-phosphate
  modified_base 11: mod_base = OTHER; note = 2'-O-methyladenosine-3'-phosphate
  modified_base 12: mod_base = OTHER; note = 2'-O-methyladenosine-3'-phosphate
  modified_base 13: mod_base = OTHER; note = 2'-O-methyladenosine-3'-phosphate
  modified_base 14: mod_base = OTHER; note = 2'-fluorocytidine-3'-phosphate
  modified_base 15: mod_base = OTHER; note = 2'-O-methyladenosine-3'-phosphate
  modified_base 16: mod_base = OTHER; note = 2'-fluoroadenosine-3'-phosphate
  modified_base 17: mod_base = OTHER; note = 2'-O-methyluridine-3'-phosphate
  modified_base 18: mod_base = OTHER; note = 2'-O-methylguanosine-3'-phosphate
  modified_base 19: mod_base = OTHER; note = 2'-O-methylguanosine-3'-phosphate
  modified_base 20: mod_base = OTHER; note = 2'-O-methyladenosine-3'-phosphate
  modified_base 21: mod_base = OTHER; note = 2'-O-methyladenosine-3'-phosphorothioate
  modified_base 22: mod_base = OTHER; note = 2'-O-methyluridine-3'-phosphorothioate
  modified_base 23: mod_base = OTHER; note = 2'-O-methylguanosine-3'-phosphate
  misc_feature 1..4: note = RNA
  misc_feature 5: note = DNA
  misc_feature 6..23: note = RNA
tcagctgcacaaacaatggaatg

SEQ ID NO: 1288 - DNA, 23 bp, synthetic construct
  source 1..23: mol_type = other DNA
  modified_base 1: mod_base = OTHER; note = Vinyl-phosphonate-2'-O-methyluridine-3'-phosphate
  modified_base 2: mod_base = OTHER; note = 2'-fluoroadenosine-3'-phosphate
  modified_base 3: mod_base = OTHER; note = 2'-O-methylguanosine-3'-phosphate
  modified_base 4: mod_base = OTHER; note = 2'-O-methylcytidine-3'-phosphate
  modified_base 6: mod_base = OTHER; note = 2'-O-methylguanosine-3'-phosphate
  modified_base 7: mod_base = OTHER; note = cytidine-2'-phosphate
  modified_base 8: mod_base = OTHER; note = 2'-O-methyluridine-3'-phosphate
  modified_base 9: mod_base = OTHER; note = 2'-O-methylguanosine-3'-phosphate
  modified_base 10: mod_base = OTHER; note = 2'-O-methylcytidine-3'-phosphate
  modified_base 11: mod_base = OTHER; note = 2'-O-methyladenosine-3'-phosphate
  modified_base 12: mod_base = OTHER; note = 2'-O-methylcytidine-3'-phosphate
  modified_base 13: mod_base = OTHER; note = 2'-O-methyladenosine-3'-phosphate
  modified_base 14: mod_base = OTHER; note = 2'-fluoroadenosine-3'-phosphate
  modified_base 15: mod_base = OTHER; note = 2'-O-methyladenosine-3'-phosphate
  modified_base 16: mod_base = OTHER; note = 2'-fluorocytidine-3'-phosphate
  modified_base 17: mod_base = OTHER; note = 2'-O-methyladenosine-3'-phosphate
  modified_base 18: mod_base = OTHER; note = 2'-O-methyladenosine-3'-phosphate
  modified_base 19: mod_base = OTHER; note = 2'-O-methyluridine-3'-phosphate
  modified_base 20: mod_base = OTHER; note = 2'-O-methylguanosine-3'-phosphate
  modified_base 21: mod_base = OTHER; note = 2'-O-methylguanosine-3'-phosphorothioate
  modified_base 22: mod_base = OTHER; note = 2'-O-methyladenosine-3'-phosphorothioate
  modified_base 23: mod_base = OTHER; note = 2'-O-methyladenosine-3'-phosphate
  misc_feature 1..4: note = RNA
  misc_feature 5: note = DNA
  misc_feature 6..23: note = RNA
tagcagctgcacaaacaatggaa

SEQ ID NO: 1289 - DNA, 23 bp, synthetic construct
  source 1..23: mol_type = other DNA
  modified_base 1: mod_base = OTHER; note = Vinyl-phosphonate-2'-O-methyluridine-3'-phosphate
  modified_base 2: mod_base = OTHER; note = 2'-fluorouridine-3'-phosphate
  modified_base 3: mod_base = OTHER; note = 2'-O-methylcytidine-3'-phosphate
  modified_base 4: mod_base = OTHER; note = 2'-O-methyluridine-3'-phosphate
  modified_base 6: mod_base = OTHER; note = 2'-O-methyluridine-3'-phosphate
  modified_base 7: mod_base = OTHER; note = cytidine-2'-phosphate
  modified_base 8: mod_base = OTHER; note = 2'-O-methyladenosine-3'-phosphate
  modified_base 9: mod_base = OTHER; note = 2'-O-methylguanosine-3'-phosphate
  modified_base 10: mod_base = OTHER; note = 2'-O-methyladenosine-3'-phosphate
  modified_base 11: mod_base = OTHER; note = 2'-O-methylguanosine-3'-phosphate
  modified_base 12: mod_base = OTHER; note = 2'-O-methylguanosine-3'-phosphate
  modified_base 13: mod_base = OTHER; note = 2'-O-methyladenosine-3'-phosphate
  modified_base 14: mod_base = OTHER; note = 2'-fluoroguanosine-3'-phosphate
  modified_base 15: mod_base = OTHER; note = 2'-O-methylcytidine-3'-phosphate
  modified_base 16: mod_base = OTHER; note = 2'-fluorouridine-3'-phosphate
  modified_base 17: mod_base = OTHER; note = 2'-O-methylguanosine-3'-phosphate
  modified_base 18: mod_base = OTHER; note = 2'-O-methyluridine-3'-phosphate
  modified_base 19: mod_base = OTHER; note = 2'-O-methylguanosine-3'-phosphate
  modified_base 20: mod_base = OTHER; note = 2'-O-methylguanosine-3'-phosphate
  modified_base 21: mod_base = OTHER; note = 2'-O-methylcytidine-3'-phosphorothioate
  modified_base 22: mod_base = OTHER; note = 2'-O-methyluridine-3'-phosphorothioate
  modified_base 23: mod_base = OTHER; note = 2'-O-methylcytidine-3'-phosphate
  misc_feature 1..4: note = RNA
  misc_feature 5: note = DNA
  misc_feature 6..23: note = RNA
ttctgtcagaggagctgtggctc

SEQ ID NO: 1290 - DNA, 23 bp, synthetic construct
  source 1..23: mol_type = other DNA
  modified_base 1: mod_base = OTHER; note = Vinyl-phosphonate-2'-O-methyluridine-3'-phosphate
  modified_base 2: mod_base = OTHER; note = 2'-fluorouridine-3'-phosphate
  modified_base 3: mod_base = OTHER; note = 2'-O-methyluridine-3'-phosphate
  modified_base 4: mod_base = OTHER; note = 2'-O-methylcytidine-3'-phosphate
  modified_base 6: mod_base = OTHER; note = 2'-O-methyluridine-3'-phosphate
  modified_base 7: mod_base = OTHER; note = guanosine-2'-phosphate
  modified_base 8: mod_base = OTHER; note = 2'-O-methyluridine-3'-phosphate
  modified_base 9: mod_base = OTHER; note = 2'-O-methyladenosine-3'-phosphate
  modified_base 10: mod_base = OTHER; note = 2'-O-methyladenosine-3'-phosphate
  modified_base 11: mod_base = OTHER; note = 2'-O-methyluridine-3'-phosphate
  modified_base 12: mod_base = OTHER; note = 2'-O-methylcytidine-3'-phosphate
  modified_base 13: mod_base = OTHER; note = 2'-O-methyluridine-3'-phosphate
  modified_base 14: mod_base = OTHER; note = 2'-fluorouridine-3'-phosphate
  modified_base 15: mod_base = OTHER; note = 2'-O-methylguanosine-3'-phosphate
  modified_base 16: mod_base = OTHER; note = 2'-fluorouridine-3'-phosphate
  modified_base 17: mod_base = OTHER; note = 2'-O-methylguanosine-3'-phosphate
  modified_base 18: mod_base = OTHER; note = 2'-O-methylguanosine-3'-phosphate
  modified_base 19: mod_base = OTHER; note = 2'-O-methylcytidine-3'-phosphate
  modified_base 20: mod_base = OTHER; note = 2'-O-methyluridine-3'-phosphate
  modified_base 21: mod_base = OTHER; note = 2'-O-methyluridine-3'-phosphorothioate
  modified_base 22: mod_base = OTHER; note = 2'-O-methylguanosine-3'-phosphorothioate
  modified_base 23: mod_base = OTHER; note = 2'-O-methyluridine-3'-phosphate
  misc_feature 1..4: note = RNA
  misc_feature 5: note = DNA
  misc_feature 6..23: note = RNA
tttcttgtaatcttgtggcttgt

SEQ ID NO: 1291 - DNA, 23 bp, synthetic construct
  source 1..23: mol_type = other DNA
  modified_base 1: mod_base = OTHER; note = Vinyl-phosphonate-2'-O-methyluridine-3'-phosphate
  modified_base 2: mod_base = OTHER; note = 2'-fluorocytidine-3'-phosphate
  modified_base 3: mod_base = OTHER; note = 2'-O-methylguanosine-3'-phosphate
  modified_base 4: mod_base = OTHER; note = 2'-O-methyluridine-3'-phosphate
  modified_base 6: mod_base = OTHER; note = 2'-O-methyluridine-3'-phosphate
  modified_base 7: mod_base = OTHER; note = cytidine-2'-phosphate
  modified_base 8: mod_base = OTHER; note = 2'-O-methyluridine-3'-phosphate
  modified_base 9: mod_base = OTHER; note = 2'-O-methyluridine-3'-phosphate
  modified_base 10: mod_base = OTHER; note = 2'-O-methylguanosine-3'-phosphate
  modified_base 11: mod_base = OTHER; note = 2'-O-methyluridine-3'-phosphate
  modified_base 12: mod_base = OTHER; note = 2'-O-methyladenosine-3'-phosphate
  modified_base 13: mod_base = OTHER; note = 2'-O-methyladenosine-3'-phosphate
  modified_base 14: mod_base = OTHER; note = 2'-fluorouridine-3'-phosphate
  modified_base 15: mod_base = OTHER; note = 2'-O-methylcytidine-3'-phosphate
  modified_base 16: mod_base = OTHER; note = 2'-fluorouridine-3'-phosphate
  modified_base 17: mod_base = OTHER; note = 2'-O-methyluridine-3'-phosphate
  modified_base 18: mod_base = OTHER; note = 2'-O-methylguanosine-3'-phosphate
  modified_base 19: mod_base = OTHER; note = 2'-O-methyluridine-3'-phosphate
  modified_base 20: mod_base = OTHER; note = 2'-O-methylguanosine-3'-phosphate
  modified_base 21: mod_base = OTHER; note = 2'-O-methylguanosine-3'-phosphorothioate
  modified_base 22: mod_base = OTHER; note = 2'-O-methylcytidine-3'-phosphorothioate
  modified_base 23: mod_base = OTHER; note = 2'-O-methyluridine-3'-phosphate
  misc_feature 1..4: note = RNA
  misc_feature 5: note = DNA
  misc_feature 6..23: note = RNA
tcgtttcttgtaatcttgtggct

SEQ ID NO: 1292 - DNA, 23 bp, synthetic construct
  source 1..23: mol_type = other DNA
  modified_base 1: mod_base = OTHER; note = Vinyl-phosphonate-2'-O-methyluridine-3'-phosphate
  modified_base 2: mod_base = OTHER; note = 2'-fluoroadenosine-3'-phosphate
  modified_base 3: mod_base = OTHER; note = 2'-O-methyladenosine-3'-phosphate
  modified_base 4: mod_base = OTHER; note = 2'-O-methylguanosine-3'-phosphate
  modified_base 6: mod_base = OTHER; note = 2'-O-methylcytidine-3'-phosphate
  modified_base 7: mod_base = OTHER; note = guanosine-2'-phosphate
  modified_base 8: mod_base = OTHER; note = 2'-O-methyluridine-3'-phosphate
  modified_base 9: mod_base = OTHER; note = 2'-O-methyluridine-3'-phosphate
  modified_base 10: mod_base = OTHER; note = 2'-O-methyluridine-3'-phosphate
  modified_base 11: mod_base = OTHER; note = 2'-O-methylcytidine-3'-phosphate
  modified_base 12: mod_base = OTHER; note = 2'-O-methyluridine-3'-phosphate
  modified_base 13: mod_base = OTHER; note = 2'-O-methyluridine-3'-phosphate
  modified_base 14: mod_base = OTHER; note = 2'-fluoroguanosine-3'-phosphate
  modified_base 15: mod_base = OTHER; note = 2'-O-methyluridine-3'-phosphate
  modified_base 16: mod_base = OTHER; note = 2'-fluoroadenosine-3'-phosphate
  modified_base 17: mod_base = OTHER; note = 2'-O-methyladenosine-3'-phosphate
  modified_base 18: mod_base = OTHER; note = 2'-O-methyluridine-3'-phosphate
  modified_base 19: mod_base = OTHER; note = 2'-O-methylcytidine-3'-phosphate
  modified_base 20: mod_base = OTHER; note = 2'-O-methyluridine-3'-phosphate
  modified_base 21: mod_base = OTHER; note = 2'-O-methyluridine-3'-phosphorothioate
  modified_base 22: mod_base = OTHER; note = 2'-O-methylguanosine-3'-phosphorothioate
  modified_base 23: mod_base = OTHER; note = 2'-O-methyluridine-3'-phosphate
  misc_feature 1..4: note = RNA
  misc_feature 5: note = DNA
  misc_feature 6..23: note = RNA
taagccgtttcttgtaatcttgt

SEQ ID NO: 1293 - DNA, 23 bp, synthetic construct
  source 1..23: mol_type = other DNA
  modified_base 1: mod_base = OTHER; note = Vinyl-phosphonate-2'-O-methyluridine-3'-phosphate
  modified_base 2: mod_base = OTHER; note = 2'-fluorouridine-3'-phosphate
  modified_base 3: mod_base = OTHER; note = 2'-O-methylguanosine-3'-phosphate
  modified_base 4: mod_base = OTHER; note = 2'-O-methyladenosine-3'-phosphate
  modified_base 6: mod_base = OTHER; note = 2'-O-methyladenosine-3'-phosphate
  modified_base 7: mod_base = OTHER; note = guanosine-2'-phosphate
  modified_base 8: mod_base = OTHER; note = 2'-O-methylcytidine-3'-phosphate
  modified_base 9: mod_base = OTHER; note = 2'-O-methylcytidine-3'-phosphate
  modified_base 10: mod_base = OTHER; note = 2'-O-methylguanosine-3'-phosphate
  modified_base 11: mod_base = OTHER; note = 2'-O-methyluridine-3'-phosphate
  modified_base 12: mod_base = OTHER; note = 2'-O-methyluridine-3'-phosphate
  modified_base 13: mod_base = OTHER; note = 2'-O-methyluridine-3'-phosphate
  modified_base 14: mod_base = OTHER; note = 2'-fluorocytidine-3'-phosphate
  modified_base 15: mod_base = OTHER; note = 2'-O-methyluridine-3'-phosphate
  modified_base 16: mod_base = OTHER; note = 2'-fluorouridine-3'-phosphate
  modified_base 17: mod_base = OTHER; note = 2'-O-methylguanosine-3'-phosphate
  modified_base 18: mod_base = OTHER; note = 2'-O-methyluridine-3'-phosphate
  modified_base 19: mod_base = OTHER; note = 2'-O-methyladenosine-3'-phosphate
  modified_base 20: mod_base = OTHER; note = 2'-O-methyladenosine-3'-phosphate
  modified_base 21: mod_base = OTHER; note = 2'-O-methyluridine-3'-phosphorothioate
  modified_base 22: mod_base = OTHER; note = 2'-O-methylcytidine-3'-phosphorothioate
  modified_base 23: mod_base = OTHER; note = 2'-O-methyluridine-3'-phosphate
  misc_feature 1..4: note = RNA
  misc_feature 5: note = DNA
  misc_feature 6..23: note = RNA
ttgaaagccgtttcttgtaatct

SEQ ID NO: 1294 - DNA, 23 bp, synthetic construct
  source 1..23: mol_type = other DNA
  modified_base 1: mod_base = OTHER; note = Vinyl-phosphonate-2'-O-methyluridine-3'-phosphate
  modified_base 2: mod_base = OTHER; note = 2'-fluoroguanosine-3'-phosphate
  modified_base 3: mod_base = OTHER; note = 2'-O-methylguanosine-3'-phosphate
  modified_base 4: mod_base = OTHER; note = 2'-O-methyluridine-3'-phosphate
  modified_base 6: mod_base = OTHER; note = 2'-O-methyladenosine-3'-phosphate
  modified_base 7: mod_base = OTHER; note = guanosine-2'-phosphate
  modified_base 8: mod_base = OTHER; note = 2'-O-methylcytidine-3'-phosphate
  modified_base 9: mod_base = OTHER; note = 2'-O-methyluridine-3'-phosphate
  modified_base 10: mod_base = OTHER; note = 2'-O-methylcytidine-3'-phosphate
  modified_base 11: mod_base = OTHER; note = 2'-O-methyladenosine-3'-phosphate
  modified_base 12: mod_base = OTHER; note = 2'-O-methyladenosine-3'-phosphate
  modified_base 13: mod_base = OTHER; note = 2'-O-methylcytidine-3'-phosphate
  modified_base 14: mod_base = OTHER; note = 2'-fluorouridine-3'-phosphate
  modified_base 15: mod_base = OTHER; note = 2'-O-methylguanosine-3'-phosphate
  modified_base 16: mod_base = OTHER; note = 2'-fluoroadenosine-3'-phosphate
  modified_base 17: mod_base = OTHER; note = 2'-O-methyladenosine-3'-phosphate
  modified_base 18: mod_base = OTHER; note = 2'-O-methyladenosine-3'-phosphate
  modified_base 19: mod_base = OTHER; note = 2'-O-methylguanosine-3'-phosphate
  modified_base 20: mod_base = OTHER; note = 2'-O-methylcytidine-3'-phosphate
  modified_base 21: mod_base = OTHER; note = 2'-O-methylcytidine-3'-phosphorothioate
  modified_base 22: mod_base = OTHER; note = 2'-O-methylguanosine-3'-phosphorothioate
  modified_base 23: mod_base = OTHER; note = 2'-O-methyluridine-3'-phosphate
  misc_feature 1..4: note = RNA
  misc_feature 5: note = DNA
  misc_feature 6..23: note = RNA
tggtcagctcaactgaaagccgt

SEQ ID NO: 1295 - DNA, 23 bp, synthetic construct
  source 1..23: mol_type = other DNA
  modified_base 1: mod_base = OTHER; note = Vinyl-phosphonate-2'-O-methyluridine-3'-phosphate
  modified_base 2: mod_base = OTHER; note = 2'-fluoroadenosine-3'-phosphate
  modified_base 3: mod_base = OTHER; note = 2'-O-methylguanosine-3'-phosphate
  modified_base 4: mod_base = OTHER; note = 2'-O-methyladenosine-3'-phosphate
  modified_base 6: mod_base = OTHER; note = 2'-O-methyladenosine-3'-phosphate
  modified_base 7: mod_base = OTHER; note = guanosine-2'-phosphate
  modified_base 8: mod_base = OTHER; note = 2'-O-methyladenosine-3'-phosphate
  modified_base 9: mod_base = OTHER; note = 2'-O-methylguanosine-3'-phosphate
  modified_base 10: mod_base = OTHER; note = 2'-O-methylcytidine-3'-phosphate
  modified_base 11: mod_base = OTHER; note = 2'-O-methyluridine-3'-phosphate
  modified_base 12: mod_base = OTHER; note = 2'-O-methylguanosine-3'-phosphate
  modified_base 13: mod_base = OTHER; note = 2'-O-methylguanosine-3'-phosphate
  modified_base 14: mod_base = OTHER; note = 2'-fluorouridine-3'-phosphate
  modified_base 15: mod_base = OTHER; note = 2'-O-methylcytidine-3'-phosphate
  modified_base 16: mod_base = OTHER; note = 2'-fluoroadenosine-3'-phosphate
  modified_base 17: mod_base = OTHER; note = 2'-O-methylguanosine-3'-phosphate
  modified_base 18: mod_base = OTHER; note = 2'-O-methylcytidine-3'-phosphate
  modified_base 19: mod_base = OTHER; note = 2'-O-methyluridine-3'-phosphate
  modified_base 20: mod_base = OTHER; note = 2'-O-methylcytidine-3'-phosphate
  modified_base 21: mod_base = OTHER; note = 2'-O-methyladenosine-3'-phosphorothioate
  modified_base 22: mod_base = OTHER; note = 2'-O-methyladenosine-3'-phosphorothioate
  modified_base 23: mod_base = OTHER; note = 2'-O-methylcytidine-3'-phosphate
  misc_feature 1..4: note = RNA
  misc_feature 5: note = DNA
  misc_feature 6..23: note = RNA
tagagagagctggtcagctcaac

SEQ ID NO: 1296 - DNA, 23 bp, synthetic construct
  source 1..23: mol_type = other DNA
  modified_base 1: mod_base = OTHER; note = Vinyl-phosphonate-2'-O-methyluridine-3'-phosphate
  modified_base 2: mod_base = OTHER; note = 2'-fluorouridine-3'-phosphate
  modified_base 3: mod_base = OTHER; note = 2'-O-methylcytidine-3'-phosphate
  modified_base 4: mod_base = OTHER; note = 2'-O-methyladenosine-3'-phosphate
  modified_base 6: mod_base = OTHER; note = 2'-O-methyluridine-3'-phosphate
  modified_base 7: mod_base = OTHER; note = cytidine-2'-phosphate
  modified_base 8: mod_base = OTHER; note = 2'-O-methylcytidine-3'-phosphate
  modified_base 9: mod_base = OTHER; note = 2'-O-methyladenosine-3'-phosphate
  modified_base 10: mod_base = OTHER; note = 2'-O-methyladenosine-3'-phosphate
  modified_base 11: mod_base = OTHER; note = 2'-O-methylguanosine-3'-phosphate
  modified_base 12: mod_base = OTHER; note = 2'-O-methylcytidine-3'-phosphate
  modified_base 13: mod_base = OTHER; note = 2'-O-methylcytidine-3'-phosphate
  modified_base 14: mod_base = OTHER; note = 2'-fluoroadenosine-3'-phosphate
  modified_base 15: mod_base = OTHER; note = 2'-O-methyluridine-3'-phosphate
  modified_base 16: mod_base = OTHER; note = 2'-fluorouridine-3'-phosphate
  modified_base 17: mod_base = OTHER; note = 2'-O-methylguanosine-3'-phosphate
  modified_base 18: mod_base = OTHER; note = 2'-O-methylguanosine-3'-phosphate
  modified_base 19: mod_base = OTHER; note = 2'-O-methylcytidine-3'-phosphate
  modified_base 20: mod_base = OTHER; note = 2'-O-methyluridine-3'-phosphate
  modified_base 21: mod_base = OTHER; note = 2'-O-methylcytidine-3'-phosphorothioate
  modified_base 22: mod_base = OTHER; note = 2'-O-methyluridine-3'-phosphorothioate
  modified_base 23: mod_base = OTHER; note = 2'-O-methylguanosine-3'-phosphate
  misc_feature 1..4: note = RNA
  misc_feature 5: note = DNA
  misc_feature 6..23: note = RNA
ttcattccaagccattggctctg

SEQ ID NO: 1297 - DNA, 23 bp, synthetic construct
  source 1..23: mol_type = other DNA
  modified_base 1: mod_base = OTHER; note = Vinyl-phosphonate-2'-O-methyluridine-3'-phosphate
  modified_base 2: mod_base = OTHER; note = 2'-fluoroadenosine-3'-phosphate
  modified_base 3: mod_base = OTHER; note = 2'-O-methyladenosine-3'-phosphate
  modified_base 4: mod_base = OTHER; note = 2'-O-methyluridine-3'-phosphate
  modified_base 6: mod_base = OTHER; note = 2'-O-methyluridine-3'-phosphate
  modified_base 7: mod_base = OTHER; note = cytidine-2'-phosphate
  modified_base 8: mod_base = OTHER; note = 2'-O-methyladenosine-3'-phosphate
  modified_base 9: mod_base = OTHER; note = 2'-O-methyladenosine-3'-phosphate
  modified_base 10: mod_base = OTHER; note = 2'-O-methylguanosine-3'-phosphate
  modified_base 11: mod_base = OTHER; note = 2'-O-methyluridine-3'-phosphate
  modified_base 12: mod_base = OTHER; note = 2'-O-methylcytidine-3'-phosphate
  modified_base 13: mod_base = OTHER; note = 2'-O-methylcytidine-3'-phosphate
  modified_base 14: mod_base = OTHER; note = 2'-fluoroadenosine-3'-phosphate
  modified_base 15: mod_base = OTHER; note = 2'-O-methyladenosine-3'-phosphate
  modified_base 16: mod_base = OTHER; note = 2'-fluoroguanosine-3'-phosphate
  modified_base 17: mod_base = OTHER; note = 2'-O-methyladenosine-3'-phosphate
  modified_base 18: mod_base = OTHER; note = 2'-O-methyluridine-3'-phosphate
  modified_base 19: mod_base = OTHER; note = 2'-O-methylcytidine-3'-phosphate
  modified_base 20: mod_base = OTHER; note = 2'-O-methyladenosine-3'-phosphate
  modified_base 21: mod_base = OTHER; note = 2'-O-methylguanosine-3'-phosphorothioate
  modified_base 22: mod_base = OTHER; note = 2'-O-methylcytidine-3'-phosphorothioate
  modified_base 23: mod_base = OTHER; note = 2'-O-methyladenosine-3'-phosphate
  misc_feature 1..4: note = RNA
  misc_feature 5: note = DNA
  misc_feature 6..23: note = RNA
taatatcaagtccaagatcagca

SEQ ID NO: 1298 - DNA, 23 bp, synthetic construct
  source 1..23: mol_type = other DNA
  modified_base 1: mod_base = OTHER; note = Vinyl-phosphonate-2'-O-methyluridine-3'-phosphate
  modified_base 2: mod_base = OTHER; note = 2'-fluorouridine-3'-phosphate
  modified_base 3: mod_base = OTHER; note = 2'-O-methyladenosine-3'-phosphate
  modified_base 4: mod_base = OTHER; note = 2'-O-methylcytidine-3'-phosphate
  modified_base 6: mod_base = OTHER; note = 2'-O-methylguanosine-3'-phosphate
  modified_base 7: mod_base = OTHER; note = guanosine-2'-phosphate
  modified_base 8: mod_base = OTHER; note = 2'-O-methyluridine-3'-phosphate
  modified_base 9: mod_base = OTHER; note = 2'-O-methylcytidine-3'-phosphate
  modified_base 10: mod_base = OTHER; note = 2'-O-methyladenosine-3'-phosphate
  modified_base 11: mod_base = OTHER; note = 2'-O-methylguanosine-3'-phosphate
  modified_base 12: mod_base = OTHER; note = 2'-O-methyluridine-3'-phosphate
  modified_base 13: mod_base = OTHER; note = 2'-O-methyladenosine-3'-phosphate
  modified_base 14: mod_base = OTHER; note = 2'-fluorouridine-3'-phosphate
  modified_base 15: mod_base = OTHER; note = 2'-O-methylcytidine-3'-phosphate
  modified_base 16: mod_base = OTHER; note = 2'-fluoroadenosine-3'-phosphate
  modified_base 17: mod_base = OTHER; note = 2'-O-methyladenosine-3'-phosphate
  modified_base 18: mod_base = OTHER; note = 2'-O-methyladenosine-3'-phosphate
  modified_base 19: mod_base = OTHER; note = 2'-O-methylcytidine-3'-phosphate
  modified_base 20: mod_base = OTHER; note = 2'-O-methylcytidine-3'-phosphate
  modified_base 21: mod_base = OTHER; note = 2'-O-methyladenosine-3'-phosphorothioate
  modified_base 22: mod_base = OTHER; note = 2'-O-methylguanosine-3'-phosphorothioate
  modified_base 23: mod_base = OTHER; note = 2'-O-methylguanosine-3'-phosphate
  misc_feature 1..4: note = RNA
  misc_feature 5: note = DNA
  misc_feature 6..23: note = RNA
ttacaggtcagtatcaaaccagg

SEQ ID NO: 1299 - DNA, 23 bp, synthetic construct
  source 1..23: mol_type = other DNA
  modified_base 1: mod_base = OTHER; note = Vinyl-phosphonate-2'-O-methyluridine-3'-phosphate
  modified_base 2: mod_base = OTHER; note = 2'-fluoroadenosine-3'-phosphate
  modified_base 3: mod_base = OTHER; note = 2'-O-methyluridine-3'-phosphate
  modified_base 4: mod_base = OTHER; note = 2'-O-methyluridine-3'-phosphate
  modified_base 6: mod_base = OTHER; note = 2'-O-methyladenosine-3'-phosphate
  modified_base 7: mod_base = OTHER; note = cytidine-2'-phosphate
  modified_base 8: mod_base = OTHER; note = 2'-O-methyladenosine-3'-phosphate
  modified_base 9: mod_base = OTHER; note = 2'-O-methylguanosine-3'-phosphate
  modified_base 10: mod_base = OTHER; note = 2'-O-methylguanosine-3'-phosphate
  modified_base 11: mod_base = OTHER; note = 2'-O-methyluridine-3'-phosphate
  modified_base 12: mod_base = OTHER; note = 2'-O-methylcytidine-3'-phosphate
  modified_base 13: mod_base = OTHER; note = 2'-O-methyladenosine-3'-phosphate
  modified_base 14: mod_base = OTHER; note = 2'-fluoroguanosine-3'-phosphate
  modified_base 15: mod_base = OTHER; note = 2'-O-methyluridine-3'-phosphate
  modified_base 16: mod_base = OTHER; note = 2'-fluoroadenosine-3'-phosphate
  modified_base 17: mod_base = OTHER; note = 2'-O-methyluridine-3'-phosphate
  modified_base 18: mod_base = OTHER; note = 2'-O-methylcytidine-3'-phosphate
  modified_base 19: mod_base = OTHER; note = 2'-O-methyladenosine-3'-phosphate
  modified_base 20: mod_base = OTHER; note = 2'-O-methyladenosine-3'-phosphate
  modified_base 21: mod_base = OTHER; note = 2'-O-methyladenosine-3'-phosphorothioate
  modified_base 22: mod_base = OTHER; note = 2'-O-methylcytidine-3'-phosphorothioate
  modified_base 23: mod_base = OTHER; note = 2'-O-methylcytidine-3'-phosphate
  misc_feature 1..4: note = RNA
  misc_feature 5: note = DNA
  misc_feature 6..23: note = RNA
tatttacaggtcagtatcaaacc

SEQ ID NO: 1300 - DNA, 23 bp, synthetic construct
  source 1..23: mol_type = other DNA
  modified_base 1: mod_base = OTHER; note = Vinyl-phosphonate-2'-O-methyluridine-3'-phosphate
  modified_base 2: mod_base = OTHER; note = 2'-fluorouridine-3'-phosphate
  modified_base 3: mod_base = OTHER; note = 2'-O-methylguanosine-3'-phosphate
  modified_base 4: mod_base = OTHER; note = 2'-O-methylguanosine-3'-phosphate
  modified_base 6: mod_base = OTHER; note = 2'-O-methyladenosine-3'-phosphate
  modified_base 7: mod_base = OTHER; note = guanosine-2'-phosphate
  modified_base 8: mod_base = OTHER; note = 2'-O-methyladenosine-3'-phosphate
  modified_base 9: mod_base = OTHER; note = 2'-O-methyluridine-3'-phosphate
  modified_base 10: mod_base = OTHER; note = 2'-O-methyluridine-3'-phosphate
  modified_base 11: mod_base = OTHER; note = 2'-O-methyluridine-3'-phosphate
  modified_base 12: mod_base = OTHER; note = 2'-O-methyladenosine-3'-phosphate
  modified_base 13: mod_base = OTHER; note = 2'-O-methylcytidine-3'-phosphate
  modified_base 14: mod_base = OTHER; note = 2'-fluoroadenosine-3'-phosphate
  modified_base 15: mod_base = OTHER; note = 2'-O-methyladenosine-3'-phosphate
  modified_base 16: mod_base = OTHER; note = 2'-fluoroadenosine-3'-phosphate
  modified_base 17: mod_base = OTHER; note = 2'-O-methyluridine-3'-phosphate
  modified_base 18: mod_base = OTHER; note = 2'-O-methyladenosine-3'-phosphate
  modified_base 19: mod_base = OTHER; note = 2'-O-methylguanosine-3'-phosphate
  modified_base 20: mod_base = OTHER; note = 2'-O-methylcytidine-3'-phosphate
  modified_base 21: mod_base = OTHER; note = 2'-O-methylcytidine-3'-phosphorothioate
  modified_base 22: mod_base = OTHER; note = 2'-O-methyluridine-3'-phosphorothioate
  modified_base 23: mod_base = OTHER; note = 2'-O-methyladenosine-3'-phosphate
  misc_feature 1..4: note = RNA
  misc_feature 5: note = DNA
  misc_feature 6..23: note = RNA
ttggcagatttacaaatagccta

SEQ ID NO: 1301 - DNA, 23 bp, synthetic construct
  source 1..23: mol_type = other DNA
  modified_base 1: mod_base = OTHER; note = Vinyl-phosphonate-2'-O-methyluridine-3'-phosphate
  modified_base 2: mod_base = OTHER; note = 2'-fluoroguanosine-3'-phosphate
  modified_base 3: mod_base = OTHER; note = 2'-O-methyladenosine-3'-phosphate
  modified_base 4: mod_base = OTHER; note = 2'-O-methyluridine-3'-phosphate
  modified_base 6: mod_base = OTHER; note = 2'-O-methyladenosine-3'-phosphate
  modified_base 7: mod_base = OTHER; note = cytidine-2'-phosphate
  modified_base 8: mod_base = OTHER; note = 2'-O-methyladenosine-3'-phosphate
  modified_base 9: mod_base = OTHER; note = 2'-O-methyluridine-3'-phosphate
  modified_base 10: mod_base = OTHER; note = 2'-O-methyladenosine-3'-phosphate
  modified_base 11: mod_base = OTHER; note = 2'-O-methyladenosine-3'-phosphate
  modified_base 12: mod_base = OTHER; note = 2'-O-methylcytidine-3'-phosphate
  modified_base 13: mod_base = OTHER; note = 2'-O-methyladenosine-3'-phosphate
  modified_base 14: mod_base = OTHER; note = 2'-fluoroadenosine-3'-phosphate
  modified_base 15: mod_base = OTHER; note = 2'-O-methylcytidine-3'-phosphate
  modified_base 16: mod_base = OTHER; note = 2'-fluorocytidine-3'-phosphate
  modified_base 17: mod_base = OTHER; note = 2'-O-methyladenosine-3'-phosphate
  modified_base 18: mod_base = OTHER; note = 2'-O-methylguanosine-3'-phosphate
  modified_base 19: mod_base = OTHER; note = 2'-O-methyladenosine-3'-phosphate
  modified_base 20: mod_base = OTHER; note = 2'-O-methyladenosine-3'-phosphate
  modified_base 21: mod_base = OTHER; note = 2'-O-methyladenosine-3'-phosphorothioate
  modified_base 22: mod_base = OTHER; note = 2'-O-methyluridine-3'-phosphorothioate
  modified_base 23: mod_base = OTHER; note = 2'-O-methylcytidine-3'-phosphate
  misc_feature 1..4: note = RNA
  misc_feature 5: note = DNA
  misc_feature 6..23: note = RNA
tgatcacataacaaccagaaatc

SEQ ID NO: 1302 - DNA, 23 bp, synthetic construct
  source 1..23: mol_type = other DNA
  modified_base 1: mod_base = OTHER; note = Vinyl-phosphonate-2'-O-methyluridine-3'-phosphate
  modified_base 2: mod_base = OTHER; note = 2'-fluoroadenosine-3'-phosphate
  modified_base 3: mod_base = OTHER; note = 2'-O-methyladenosine-3'-phosphate
  modified_base 4: mod_base = OTHER; note = 2'-O-methyluridine-3'-phosphate
  modified_base 6: mod_base = OTHER; note = 2'-O-methyladenosine-3'-phosphate
  modified_base 7: mod_base = OTHER; note = cytidine-2'-phosphate
  modified_base 8: mod_base = OTHER; note = 2'-O-methyluridine-3'-phosphate
  modified_base 9: mod_base = OTHER; note = 2'-O-methyluridine-3'-phosphate
  modified_base 10: mod_base = OTHER; note = 2'-O-methylcytidine-3'-phosphate
  modified_base 11: mod_base = OTHER; note = 2'-O-methylcytidine-3'-phosphate
  modified_base 12: mod_base = OTHER; note = 2'-O-methyladenosine-3'-phosphate
  modified_base 13: mod_base = OTHER; note = 2'-O-methylcytidine-3'-phosphate
  modified_base 14: mod_base = OTHER; note = 2'-fluoroadenosine-3'-phosphate
  modified_base 15: mod_base = OTHER; note = 2'-O-methylcytidine-3'-phosphate
  modified_base 16: mod_base = OTHER; note = 2'-fluoroadenosine-3'-phosphate
  modified_base 17: mod_base = OTHER; note = 2'-O-methyluridine-3'-phosphate
  modified_base 18: mod_base = OTHER; note = 2'-O-methylguanosine-3'-phosphate
  modified_base 19: mod_base = OTHER; note = 2'-O-methyladenosine-3'-phosphate
  modified_base 20: mod_base = OTHER; note = 2'-O-methyluridine-3'-phosphate
  modified_base 21: mod_base = OTHER; note = 2'-O-methylcytidine-3'-phosphorothioate
  modified_base 22: mod_base = OTHER; note = 2'-O-methyladenosine-3'-phosphorothioate
  modified_base 23: mod_base = OTHER; note = 2'-O-methylcytidine-3'-phosphate
  misc_feature 1..4: note = RNA
  misc_feature 5: note = DNA
  misc_feature 6..23: note = RNA
taataacttccacacatgatcac

SEQ ID NO: 1303 - DNA, 23 bp, synthetic construct
  source 1..23: mol_type = other DNA
  modified_base 1: mod_base = OTHER; note = Vinyl-phosphonate-2'-O-methyluridine-3'-phosphate
  modified_base 2: mod_base = OTHER; note = 2'-fluorouridine-3'-phosphate
  modified_base 3: mod_base = OTHER; note = 2'-O-methylguanosine-3'-phosphate
  modified_base 4: mod_base = OTHER; note = 2'-O-methyluridine-3'-phosphate
  modified_base 6: mod_base = OTHER; note = 2'-O-methyladenosine-3'-phosphate
  modified_base 7: mod_base = OTHER; note = cytidine-2'-phosphate
  modified_base 8: mod_base = OTHER; note = 2'-O-methyluridine-3'-phosphate
  modified_base 9: mod_base = OTHER; note = 2'-O-methylcytidine-3'-phosphate
  modified_base 10: mod_base = OTHER; note = 2'-O-methyladenosine-3'-phosphate
  modified_base 11: mod_base = OTHER; note = 2'-O-methyluridine-3'-phosphate
  modified_base 12: mod_base = OTHER; note = 2'-O-methyluridine-3'-phosphate
  modified_base 13: mod_base = OTHER; note = 2'-O-methyluridine-3'-phosphate
  modified_base 14: mod_base = OTHER; note = 2'-fluoroguanosine-3'-phosphate
  modified_base 15: mod_base = OTHER; note = 2'-O-methyladenosine-3'-phosphate
  modified_base 16: mod_base = OTHER; note = 2'-fluoroguanosine-3'-phosphate
  modified_base 17: mod_base = OTHER; note = 2'-O-methyluridine-3'-phosphate
  modified_base 18: mod_base = OTHER; note = 2'-O-methyladenosine-3'-phosphate
  modified_base 19: mod_base = OTHER; note = 2'-O-methyluridine-3'-phosphate
  modified_base 20: mod_base = OTHER; note = 2'-O-methyluridine-3'-phosphate
  modified_base 21: mod_base = OTHER; note = 2'-O-methyladenosine-3'-phosphorothioate
  modified_base 22: mod_base = OTHER; note = 2'-O-methyladenosine-3'-phosphorothioate
  modified_base 23: mod_base = OTHER; note = 2'-O-methylguanosine-3'-phosphate
  misc_feature 1..4: note = RNA
  misc_feature 5: note = DNA
  misc_feature 6..23: note = RNA
ttgttactcatttgagtattaag

SEQ ID NO: 1304 - DNA, 23 bp, synthetic construct
  source 1..23: mol_type = other DNA
  modified_base 1: mod_base = OTHER; note = Vinyl-phosphonate-2'-O-methyluridine-3'-phosphate
  modified_base 2: mod_base = OTHER; note = 2'-fluoroadenosine-3'-phosphate
  modified_base 3: mod_base = OTHER; note = 2'-O-methylcytidine-3'-phosphate
  modified_base 4: mod_base = OTHER; note = 2'-O-methyladenosine-3'-phosphate
  modified_base 6: mod_base = OTHER; note = 2'-O-methyluridine-3'-phosphate
  modified_base 7: mod_base = OTHER; note = guanosine-2'-phosphate
  modified_base 8: mod_base = OTHER; note = 2'-O-methylcytidine-3'-phosphate
  modified_base 9: mod_base = OTHER; note = 2'-O-methyladenosine-3'-phosphate
  modified_base 10: mod_base = OTHER; note = 2'-O-methyladenosine-3'-phosphate
  modified_base 11: mod_base = OTHER; note = 2'-O-methylguanosine-3'-phosphate
  modified_base 12: mod_base = OTHER; note = 2'-O-methyluridine-3'-phosphate
  modified_base 13: mod_base = OTHER; note = 2'-O-methyluridine-3'-phosphate
  modified_base 14: mod_base = OTHER; note = 2'-fluorocytidine-3'-phosphate
  modified_base 15: mod_base = OTHER; note = 2'-O-methyladenosine-3'-phosphate
  modified_base 16: mod_base = OTHER; note = 2'-fluoroguanosine-3'-phosphate
  modified_base 17: mod_base = OTHER; note = 2'-O-methyladenosine-3'-phosphate
  modified_base 18: mod_base = OTHER; note = 2'-O-methylcytidine-3'-phosphate
  modified_base 19: mod_base = OTHER; note = 2'-O-methyladenosine-3'-phosphate
  modified_base 20: mod_base = OTHER; note = 2'-O-methyladenosine-3'-phosphate
  modified_base 21: mod_base = OTHER; note = 2'-O-methyluridine-3'-phosphorothioate
  modified_base 22: mod_base = OTHER; note = 2'-O-methyladenosine-3'-phosphorothioate
  modified_base 23: mod_base = OTHER; note = 2'-O-methylcytidine-3'-phosphate
  misc_feature 1..4: note = RNA
  misc_feature 5: note = DNA
  misc_feature 6..23: note = RNA
tacaatgcaagttcagacaatac

SEQ ID NO: 1305 - DNA, 23 bp, synthetic construct
  source 1..23: mol_type = other DNA
  modified_base 1: mod_base = OTHER; note = Vinyl-phosphonate-2'-O-methyluridine-3'-phosphate
  modified_base 2: mod_base = OTHER; note = 2'-fluoroadenosine-3'-phosphate
  modified_base 3: mod_base = OTHER; note = 2'-O-methylguanosine-3'-phosphate
  modified_base 4: mod_base = OTHER; note = 2'-O-methyluridine-3'-phosphate
  modified_base 6: mod_base = OTHER; note = 2'-O-methyluridine-3'-phosphate
  modified_base 7: mod_base = OTHER; note = guanosine-2'-phosphate
  modified_base 8: mod_base = OTHER; note = 2'-O-methyluridine-3'-phosphate
  modified_base 9: mod_base = OTHER; note = 2'-O-methylcytidine-3'-phosphate
  modified_base 10: mod_base = OTHER; note = 2'-O-methyladenosine-3'-phosphate
  modified_base 11: mod_base = OTHER; note = 2'-O-methylguanosine-3'-phosphate
  modified_base 12: mod_base = OTHER; note = 2'-O-methylguanosine-3'-phosphate
  modified_base 13: mod_base = OTHER; note = 2'-O-methylcytidine-3'-phosphate
  modified_base 14: mod_base = OTHER; note = 2'-fluoroadenosine-3'-phosphate
  modified_base 15: mod_base = OTHER; note = 2'-O-methylcytidine-3'-phosphate
  modified_base 16: mod_base = OTHER; note = 2'-fluorouridine-3'-phosphate
  modified_base 17: mod_base = OTHER; note = 2'-O-methyluridine-3'-phosphate
  modified_base 18: mod_base = OTHER; note = 2'-O-methyluridine-3'-phosphate
  modified_base 19: mod_base = OTHER; note = 2'-O-methylcytidine-3'-phosphate
  modified_base 20: mod_base = OTHER; note = 2'-O-methyluridine-3'-phosphate
  modified_base 21: mod_base = OTHER; note = 2'-O-methylguanosine-3'-phosphorothioate
  modified_base 22: mod_base = OTHER; note = 2'-O-methyladenosine-3'-phosphorothioate
  modified_base 23: mod_base = OTHER; note = 2'-O-methylguanosine-3'-phosphate
  misc_feature 1..4: note = RNA
  misc_feature 5: note = DNA
  misc_feature 6..23: note = RNA
tagtgtgtcaggcactttctgag

SEQ ID NO: 1306 - DNA, 23 bp, synthetic construct
  source 1..23: mol_type = other DNA
  modified_base 1: mod_base = OTHER; note = Vinyl-phosphonate-2'-O-methyluridine-3'-phosphate
  modified_base 2: mod_base = OTHER; note = 2'-fluorouridine-3'-phosphate
  modified_base 3: mod_base = OTHER; note = 2'-O-methyluridine-3'-phosphate
  modified_base 4: mod_base = OTHER; note = 2'-O-methyladenosine-3'-phosphate
  modified_base 6: mod_base = OTHER; note = 2'-O-methyluridine-3'-phosphate
  modified_base 7: mod_base = OTHER; note = guanosine-2'-phosphate
  modified_base 8: mod_base = OTHER; note = 2'-O-methyluridine-3'-phosphate
  modified_base 9: mod_base = OTHER; note = 2'-O-methylguanosine-3'-phosphate
  modified_base 10: mod_base = OTHER; note = 2'-O-methyluridine-3'-phosphate
  modified_base 11: mod_base = OTHER; note = 2'-O-methylcytidine-3'-phosphate
  modified_base 12: mod_base = OTHER; note = 2'-O-methyladenosine-3'-phosphate
  modified_base 13: mod_base = OTHER; note = 2'-O-methylguanosine-3'-phosphate
  modified_base 14: mod_base = OTHER; note = 2'-fluoroguanosine-3'-phosphate
  modified_base 15: mod_base = OTHER; note = 2'-O-methylcytidine-3'-phosphate
  modified_base 16: mod_base = OTHER; note = 2'-fluoroadenosine-3'-phosphate
  modified_base 17: mod_base = OTHER; note = 2'-O-methylcytidine-3'-phosphate
  modified_base 18: mod_base = OTHER; note = 2'-O-methyluridine-3'-phosphate
  modified_base 19: mod_base = OTHER; note = 2'-O-methyluridine-3'-phosphate
  modified_base 20: mod_base = OTHER; note = 2'-O-methyluridine-3'-phosphate
  modified_base 21: mod_base = OTHER; note = 2'-O-methylcytidine-3'-phosphorothioate
  modified_base 22: mod_base = OTHER; note = 2'-O-methyluridine-3'-phosphorothioate
  modified_base 23: mod_base = OTHER; note = 2'-O-methylguanosine-3'-phosphate
  misc_feature 1..4: note = RNA
  misc_feature 5: note = DNA
  misc_feature 6..23: note = RNA
tttagtgtgtcaggcactttctg

SEQ ID NO: 1307 - DNA, 23 bp, synthetic construct
  source 1..23: mol_type = other DNA
  modified_base 1: mod_base = OTHER; note = Vinyl-phosphonate-2'-O-methyluridine-3'-phosphate
  modified_base 2: mod_base = OTHER; note = 2'-fluoroguanosine-3'-phosphate
  modified_base 3: mod_base = OTHER; note = 2'-O-methylcytidine-3'-phosphate
  modified_base 4: mod_base = OTHER; note = 2'-O-methyluridine-3'-phosphate
  modified_base 6: mod_base = OTHER; note = 2'-O-methylguanosine-3'-phosphate
  modified_base 7: mod_base = OTHER; note = guanosine-2'-phosphate
  modified_base 8: mod_base = OTHER; note = 2'-O-methyluridine-3'-phosphate
  modified_base 9: mod_base = OTHER; note = 2'-O-methyluridine-3'-phosphate
  modified_base 10: mod_base = OTHER; note = 2'-O-methyladenosine-3'-phosphate
  modified_base 11: mod_base = OTHER; note = 2'-O-methylguanosine-3'-phosphate
  modified_base 12: mod_base = OTHER; note = 2'-O-methyluridine-3'-phosphate
  modified_base 13: mod_base = OTHER; note = 2'-O-methylguanosine-3'-phosphate
  modified_base 14: mod_base = OTHER; note = 2'-fluorouridine-3'-phosphate
  modified_base 15: mod_base = OTHER; note = 2'-O-methylguanosine-3'-phosphate
  modified_base 16: mod_base = OTHER; note = 2'-fluorouridine-3'-phosphate
  modified_base 17: mod_base = OTHER; note = 2'-O-methylcytidine-3'-phosphate
  modified_base 18: mod_base = OTHER; note = 2'-O-methyladenosine-3'-phosphate
  modified_base 19: mod_base = OTHER; note = 2'-O-methylguanosine-3'-phosphate
  modified_base 20: mod_base = OTHER; note = 2'-O-methylguanosine-3'-phosphate
  modified_base 21: mod_base = OTHER; note = 2'-O-methylcytidine-3'-phosphorothioate
  modified_base 22: mod_base = OTHER; note = 2'-O-methyladenosine-3'-phosphorothioate
  modified_base 23: mod_base = OTHER; note = 2'-O-methylcytidine-3'-phosphate
  misc_feature 1..4: note = RNA
  misc_feature 5: note = DNA
  misc_feature 6..23: note = RNA
tgcttggttagtgtgtcaggcac

SEQ ID NO: 1308 - DNA, 23 bp, synthetic construct
  source 1..23: mol_type = other DNA
  modified_base 1: mod_base = OTHER; note = Vinyl-phosphonate-2'-O-methyluridine-3'-phosphate
  modified_base 2: mod_base = OTHER; note = 2'-fluoroguanosine-3'-phosphate
  modified_base 3: mod_base = OTHER; note = 2'-O-methyluridine-3'-phosphate
  modified_base 4: mod_base = OTHER; note = 2'-O-methyluridine-3'-phosphate
  modified_base 6: mod_base = OTHER; note = 2'-O-methyladenosine-3'-phosphate
  modified_base 7: mod_base = OTHER; note = cytidine-2'-phosphate
  modified_base 8: mod_base = OTHER; note = 2'-O-methyluridine-3'-phosphate
  modified_base 9: mod_base = OTHER; note = 2'-O-methyluridine-3'-phosphate
  modified_base 10: mod_base = OTHER; note = 2'-O-methylcytidine-3'-phosphate
  modified_base 11: mod_base = OTHER; note = 2'-O-methyladenosine-3'-phosphate
  modified_base 12: mod_base = OTHER; note = 2'-O-methyladenosine-3'-phosphate
  modified_base 13: mod_base = OTHER; note = 2'-O-methyluridine-3'-phosphate
  modified_base 14: mod_base = OTHER; note = 2'-fluorouridine-3'-phosphate
  modified_base 15: mod_base = OTHER; note = 2'-O-methylguanosine-3'-phosphate
  modified_base 16: mod_base = OTHER; note = 2'-fluorouridine-3'-phosphate
  modified_base 17: mod_base = OTHER; note = 2'-O-methyluridine-3'-phosphate
  modified_base 18: mod_base = OTHER; note = 2'-O-methylcytidine-3'-phosphate
  modified_base 19: mod_base = OTHER; note = 2'-O-methylcytidine-3'-phosphate
  modified_base 20: mod_base = OTHER; note = 2'-O-methylcytidine-3'-phosphate
  modified_base 21: mod_base = OTHER; note = 2'-O-methyladenosine-3'-phosphorothioate
  modified_base 22: mod_base = OTHER; note = 2'-O-methyluridine-3'-phosphorothioate
  modified_base 23: mod_base = OTHER; note = 2'-O-methyladenosine-3'-phosphate
  misc_feature 1..4: note = RNA
  misc_feature 5: note = DNA
  misc_feature 6..23: note = RNA
tgtttacttcaattgttcccata

SEQ ID NO: 1309 - DNA, 23 bp, synthetic construct
  source 1..23: mol_type = other DNA
  modified_base 1: mod_base = OTHER; note = Vinyl-phosphonate-2'-O-methyluridine-3'-phosphate
  modified_base 2: mod_base = OTHER; note = 2'-fluoroadenosine-3'-phosphate
  modified_base 3: mod_base = OTHER; note = 2'-O-methyladenosine-3'-phosphate
  modified_base 4: mod_base = OTHER; note = 2'-O-methyluridine-3'-phosphate
  modified_base 6: mod_base = OTHER; note = 2'-O-methylcytidine-3'-phosphate
  modified_base 7: mod_base = OTHER; note = cytidine-2'-phosphate
  modified_base 8: mod_base = OTHER; note = 2'-O-methyladenosine-3'-phosphate
  modified_base 9: mod_base = OTHER; note = 2'-O-methyluridine-3'-phosphate
  modified_base 10: mod_base = OTHER; note = 2'-O-methylcytidine-3'-phosphate
  modified_base 11: mod_base = OTHER; note = 2'-O-methyluridine-3'-phosphate
  modified_base 12: mod_base = OTHER; note = 2'-O-methyluridine-3'-phosphate
  modified_base 13: mod_base = OTHER; note = 2'-O-methylguanosine-3'-phosphate
  modified_base 14: mod_base = OTHER; note = 2'-fluorouridine-3'-phosphate
  modified_base 15: mod_base = OTHER; note = 2'-O-methylguanosine-3'-phosphate
  modified_base 16: mod_base = OTHER; note = 2'-fluoroadenosine-3'-phosphate
  modified_base 17: mod_base = OTHER; note = 2'-O-methyluridine-3'-phosphate
  modified_base 18: mod_base = OTHER; note = 2'-O-methylcytidine-3'-phosphate
  modified_base 19: mod_base = OTHER; note = 2'-O-methylcytidine-3'-phosphate
  modified_base 20: mod_base = OTHER; note = 2'-O-methyladenosine-3'-phosphate
  modified_base 21: mod_base = OTHER; note = 2'-O-methyluridine-3'-phosphorothioate
  modified_base 22: mod_base = OTHER; note = 2'-O-methyluridine-3'-phosphorothioate
  modified_base 23: mod_base = OTHER; note = 2'-O-methylcytidine-3'-phosphate
  misc_feature 1..4: note = RNA
  misc_feature 5: note = DNA
  misc_feature 6..23: note = RNA
taattccatcttgtgatccattc

SEQ ID NO: 1310 - DNA, 23 bp, synthetic construct
  source 1..23: mol_type = other DNA
  modified_base 1: mod_base = OTHER; note = Vinyl-phosphonate-2'-O-methyluridine-3'-phosphate
  modified_base 2: mod_base = OTHER; note = 2'-fluorocytidine-3'-phosphate
  modified_base 3: mod_base = OTHER; note = 2'-O-methyladenosine-3'-phosphate
  modified_base 4: mod_base = OTHER; note = 2'-O-methyladenosine-3'-phosphate
  modified_base 6: mod_base = OTHER; note = 2'-O-methylguanosine-3'-phosphate
  modified_base 7: mod_base = OTHER; note = cytidine-2'-phosphate
  modified_base 8: mod_base = OTHER; note = 2'-O-methyluridine-3'-phosphate
  modified_base 9: mod_base = OTHER; note = 2'-O-methyladenosine-3'-phosphate
  modified_base 10: mod_base = OTHER; note = 2'-O-methylguanosine-3'-phosphate
  modified_base 11: mod_base = OTHER; note = 2'-O-methylguanosine-3'-phosphate
  modified_base 12: mod_base = OTHER; note = 2'-O-methylguanosine-3'-phosphate
  modified_base 13: mod_base = OTHER; note = 2'-O-methyluridine-3'-phosphate
  modified_base 14: mod_base = OTHER; note = 2'-fluorouridine-3'-phosphate
  modified_base 15: mod_base = OTHER; note = 2'-O-methyluridine-3'-phosphate
  modified_base 16: mod_base = OTHER; note = 2'-fluoroguanosine-3'-phosphate
  modified_base 17: mod_base = OTHER; note = 2'-O-methyladenosine-3'-phosphate
  modified_base 18: mod_base = OTHER; note = 2'-O-methyluridine-3'-phosphate
  modified_base 19: mod_base = OTHER; note = 2'-O-methyladenosine-3'-phosphate
  modified_base 20: mod_base = OTHER; note = 2'-O-methyladenosine-3'-phosphate
  modified_base 21: mod_base = OTHER; note = 2'-O-methyladenosine-3'-phosphorothioate
  modified_base 22: mod_base = OTHER; note = 2'-O-methyluridine-3'-phosphorothioate
  modified_base 23: mod_base = OTHER; note = 2'-O-methyluridine-3'-phosphate
  misc_feature 1..4: note = RNA
  misc_feature 5: note = DNA
  misc_feature 6..23: note = RNA
tcaaggctagggtttgataaatt

SEQ ID NO: 1311 - DNA, 23 bp, synthetic construct
  source 1..23: mol_type = other DNA
  modified_base 1: mod_base = OTHER; note = Vinyl-phosphonate-2'-O-methyluridine-3'-phosphate
  modified_base 2: mod_base = OTHER; note = 2'-fluoroadenosine-3'-phosphate
  modified_base 3: mod_base = OTHER; note = 2'-O-methylguanosine-3'-phosphate
  modified_base 4: mod_base = OTHER; note = 2'-O-methyluridine-3'-phosphate
  modified_base 6: mod_base = OTHER; note = 2'-O-methyladenosine-3'-phosphate
  modified_base 7: mod_base = OTHER; note = guanosine-2'-phosphate
  modified_base 8: mod_base = OTHER; note = 2'-O-methyluridine-3'-phosphate
  modified_base 9: mod_base = OTHER; note = 2'-O-methyladenosine-3'-phosphate
  modified_base 10: mod_base = OTHER; note = 2'-O-methylcytidine-3'-phosphate
  modified_base 11: mod_base = OTHER; note = 2'-O-methylcytidine-3'-phosphate
  modified_base 12: mod_base = OTHER; note = 2'-O-methyladenosine-3'-phosphate
  modified_base 13: mod_base = OTHER; note = 2'-O-methyluridine-3'-phosphate
  modified_base 14: mod_base = OTHER; note = 2'-fluorouridine-3'-phosphate
  modified_base 15: mod_base = OTHER; note = 2'-O-methyladenosine-3'-phosphate
  modified_base 16: mod_base = OTHER; note = 2'-fluorocytidine-3'-phosphate
  modified_base 17: mod_base = OTHER; note = 2'-O-methyladenosine-3'-phosphate
  modified_base 18: mod_base = OTHER; note = 2'-O-methylguanosine-3'-phosphate
  modified_base 19: mod_base = OTHER; note = 2'-O-methyladenosine-3'-phosphate
  modified_base 20: mod_base = OTHER; note = 2'-O-methyluridine-3'-phosphate
  modified_base 21: mod_base = OTHER; note = 2'-O-methyladenosine-3'-phosphorothioate
  modified_base 22: mod_base = OTHER; note = 2'-O-methyluridine-3'-phosphorothioate
  modified_base 23: mod_base = OTHER; note = 2'-O-methyluridine-3'-phosphate
  misc_feature 1..4: note = RNA
  misc_feature 5: note = DNA
  misc_feature 6..23: note = RNA
tagtcagtaccattacagatatt

SEQ ID NO: 1312 - DNA, 23 bp, synthetic construct
  source 1..23: mol_type = other DNA
  modified_base 1: mod_base = OTHER; note = Vinyl-phosphonate-2'-O-methyluridine-3'-phosphate
  modified_base 2: mod_base = OTHER; note = 2'-fluoroadenosine-3'-phosphate
  modified_base 3: mod_base = OTHER; note = 2'-O-methylguanosine-3'-phosphate
  modified_base 4: mod_base = OTHER; note = 2'-O-methylcytidine-3'-phosphate
  modified_base 6: mod_base = OTHER; note = 2'-O-methyladenosine-3'-phosphate
  modified_base 7: mod_base = OTHER; note = cytidine-2'-phosphate
  modified_base 8: mod_base = OTHER; note = 2'-O-methyluridine-3'-phosphate
  modified_base 9: mod_base = OTHER; note = 2'-O-methyluridine-3'-phosphate
  modified_base 10: mod_base = OTHER; note = 2'-O-methylcytidine-3'-phosphate
  modified_base 11: mod_base = OTHER; note = 2'-O-methyladenosine-3'-phosphate
  modified_base 12: mod_base = OTHER; note = 2'-O-methyladenosine-3'-phosphate
  modified_base 13: mod_base = OTHER; note = 2'-O-methyladenosine-3'-phosphate
  modified_base 14: mod_base = OTHER; note = 2'-fluoroguanosine-3'-phosphate
  modified_base 15: mod_base = OTHER; note = 2'-O-methylcytidine-3'-phosphate
  modified_base 16: mod_base = OTHER; note = 2'-fluoroadenosine-3'-phosphate
  modified_base 17: mod_base = OTHER; note = 2'-O-methyladenosine-3'-phosphate
  modified_base 18: mod_base = OTHER; note = 2'-O-methylguanosine-3'-phosphate
  modified_base 19: mod_base = OTHER; note = 2'-O-methylcytidine-3'-phosphate
  modified_base 20: mod_base = OTHER; note = 2'-O-methyladenosine-3'-phosphate
  modified_base 21: mod_base = OTHER; note = 2'-O-methyladenosine-3'-phosphorothioate
  modified_base 22: mod_base = OTHER; note = 2'-O-methyladenosine-3'-phosphorothioate
  modified_base 23: mod_base = OTHER; note = 2'-O-methylguanosine-3'-phosphate
  misc_feature 1..4: note = RNA
  misc_feature 5: note = DNA
  misc_feature 6..23: note = RNA
tagctacttcaaagcaagcaaag

SEQ ID NO: 1313 - DNA, 23 bp, synthetic construct
  source 1..23: mol_type = other DNA
  modified_base 1: mod_base = OTHER; note = Vinyl-phosphonate-2'-O-methyluridine-3'-phosphate
  modified_base 2: mod_base = OTHER; note = 2'-fluoroadenosine-3'-phosphate
  modified_base 3: mod_base = OTHER; note = 2'-O-methyluridine-3'-phosphate
  modified_base 4: mod_base = OTHER; note = 2'-O-methyluridine-3'-phosphate
  modified_base 6: mod_base = OTHER; note = 2'-O-methyladenosine-3'-phosphate
  modified_base 7: mod_base = OTHER; note = cytidine-2'-phosphate
  modified_base 8: mod_base = OTHER; note = 2'-O-methyluridine-3'-phosphate
  modified_base 9: mod_base = OTHER; note = 2'-O-methyladenosine-3'-phosphate
  modified_base 10: mod_base = OTHER; note = 2'-O-methyluridine-3'-phosphate
  modified_base 11: mod_base = OTHER; note = 2'-O-methyladenosine-3'-phosphate
  modified_base 12: mod_base = OTHER; note = 2'-O-methyladenosine-3'-phosphate
  modified_base 13: mod_base = OTHER; note = 2'-O-methylcytidine-3'-phosphate
  modified_base 14: mod_base = OTHER; note = 2'-fluorouridine-3'-phosphate
  modified_base 15: mod_base = OTHER; note = 2'-O-methyluridine-3'-phosphate
  modified_base 16: mod_base = OTHER; note = 2'-fluoroadenosine-3'-phosphate
  modified_base 17: mod_base = OTHER; note = 2'-O-methyladenosine-3'-phosphate
  modified_base 18: mod_base = OTHER; note = 2'-O-methylcytidine-3'-phosphate
  modified_base 19: mod_base = OTHER; note = 2'-O-methyladenosine-3'-phosphate
  modified_base 20: mod_base = OTHER; note = 2'-O-methylcytidine-3'-phosphate
  modified_base 21: mod_base = OTHER; note = 2'-O-methyluridine-3'-phosphorothioate
  modified_base 22: mod_base = OTHER; note = 2'-O-methyladenosine-3'-phosphorothioate
  modified_base 23: mod_base = OTHER; note = 2'-O-methylcytidine-3'-phosphate
  misc_feature 1..4: note = RNA
  misc_feature 5: note = DNA
  misc_feature 6..23: note = RNA
tattcactataacttaacactac

SEQ ID NO: 1314 - DNA, 23 bp, synthetic construct
  source 1..23: mol_type = other DNA
  modified_base 1: mod_base = OTHER; note = Vinyl-phosphonate-2'-O-methyluridine-3'-phosphate
  modified_base 2: mod_base = OTHER; note = 2'-fluoroguanosine-3'-phosphate
  modified_base 3: mod_base = OTHER; note = 2'-O-methyluridine-3'-phosphate
  modified_base 4: mod_base = OTHER; note = 2'-O-methyladenosine-3'-phosphate
  modified_base 6: mod_base = OTHER; note = 2'-O-methyluridine-3'-phosphate
  modified_base 7: mod_base = OTHER; note = cytidine-2'-phosphate
  modified_base 8: mod_base = OTHER; note = 2'-O-methyladenosine-3'-phosphate
  modified_base 9: mod_base = OTHER; note = 2'-O-methylcytidine-3'-phosphate
  modified_base 10: mod_base = OTHER; note = 2'-O-methyluridine-3'-phosphate
  modified_base 11: mod_base = OTHER; note = 2'-O-methyladenosine-3'-phosphate
  modified_base 12: mod_base = OTHER; note = 2'-O-methyluridine-3'-phosphate
  modified_base 13: mod_base = OTHER; note = 2'-O-methyladenosine-3'-phosphate
  modified_base 14: mod_base = OTHER; note = 2'-fluoroadenosine-3'-phosphate
  modified_base 15: mod_base = OTHER; note = 2'-O-methylcytidine-3'-phosphate
  modified_base 16: mod_base = OTHER; note = 2'-fluorouridine-3'-phosphate
  modified_base 17: mod_base = OTHER; note = 2'-O-methyluridine-3'-phosphate
  modified_base 18: mod_base = OTHER; note = 2'-O-methyladenosine-3'-phosphate
  modified_base 19: mod_base = OTHER; note = 2'-O-methyladenosine-3'-phosphate
  modified_base 20: mod_base = OTHER; note = 2'-O-methylcytidine-3'-phosphate
  modified_base 21: mod_base = OTHER; note = 2'-O-methyladenosine-3'-phosphorothioate
  modified_base 22: mod_base = OTHER; note = 2'-O-methylcytidine-3'-phosphorothioate
  modified_base 23: mod_base = OTHER; note = 2'-O-methyluridine-3'-phosphate
  misc_feature 1..4: note = RNA
  misc_feature 5: note = DNA
  misc_feature 6..23: note = RNA
tgtattcactataacttaacact

SEQ ID NO: 1315 - DNA, 23 bp, synthetic construct
  source 1..23: mol_type = other DNA
  modified_base 1: mod_base = OTHER; note = Vinyl-phosphonate-2'-O-methyluridine-3'-phosphate
  modified_base 2: mod_base = OTHER; note = 2'-fluorouridine-3'-phosphate
  modified_base 3: mod_base = OTHER; note = 2'-O-methyluridine-3'-phosphate
  modified_base 4: mod_base = OTHER; note = 2'-O-methyladenosine-3'-phosphate
  modified_base 6: mod_base = OTHER; note = 2'-O-methyluridine-3'-phosphate
  modified_base 7: mod_base = OTHER; note = guanosine-2'-phosphate
  modified_base 8: mod_base = OTHER; note = 2'-O-methyluridine-3'-phosphate
  modified_base 9: mod_base = OTHER; note = 2'-O-methyluridine-3'-phosphate
  modified_base 10: mod_base = OTHER; note = 2'-O-methylcytidine-3'-phosphate
  modified_base 11: mod_base = OTHER; note = 2'-O-methyluridine-3'-phosphate
  modified_base 12: mod_base = OTHER; note = 2'-O-methyladenosine-3'-phosphate
  modified_base 13: mod_base = OTHER; note = 2'-O-methylcytidine-3'-phosphate
  modified_base 14: mod_base = OTHER; note = 2'-fluoroadenosine-3'-phosphate
  modified_base 15: mod_base = OTHER; note = 2'-O-methylcytidine-3'-phosphate
  modified_base 16: mod_base = OTHER; note = 2'-fluorocytidine-3'-phosphate
  modified_base 17: mod_base = OTHER; note = 2'-O-methyladenosine-3'-phosphate
  modified_base 18: mod_base = OTHER; note = 2'-O-methyluridine-3'-phosphate
  modified_base 19: mod_base = OTHER; note = 2'-O-methyluridine-3'-phosphate
  modified_base 20: mod_base = OTHER; note = 2'-O-methyladenosine-3'-phosphate
  modified_base 21: mod_base = OTHER; note = 2'-O-methylcytidine-3'-phosphorothioate
  modified_base 22: mod_base = OTHER; note = 2'-O-methyluridine-3'-phosphorothioate
  modified_base 23: mod_base = OTHER; note = 2'-O-methylcytidine-3'-phosphate
  misc_feature 1..4: note = RNA
  misc_feature 5: note = DNA
  misc_feature 6..23: note = RNA
tttagtgttctacaccattactc

SEQ ID NO: 1316 - DNA, 23 bp, synthetic construct
  source 1..23: mol_type = other DNA
  modified_base 1: mod_base = OTHER; note = Vinyl-phosphonate-2'-O-methyluridine-3'-phosphate
  modified_base 2: mod_base = OTHER; note = 2'-fluoroadenosine-3'-phosphate
  modified_base 3: mod_base = OTHER; note = 2'-O-methyladenosine-3'-phosphate
  modified_base 4: mod_base = OTHER; note = 2'-O-methyluridine-3'-phosphate
  modified_base 6: mod_base = OTHER; note = 2'-O-methyladenosine-3'-phosphate
  modified_base 7: mod_base = OTHER; note = guanosine-2'-phosphate
  modified_base 8: mod_base = OTHER; note = 2'-O-methyluridine-3'-phosphate
  modified_base 9: mod_base = OTHER; note = 2'-O-methylguanosine-3'-phosphate
  modified_base 10: mod_base = OTHER; note = 2'-O-methyluridine-3'-phosphate
  modified_base 11: mod_base = OTHER; note = 2'-O-methyluridine-3'-phosphate
  modified_base 12: mod_base = OTHER; note = 2'-O-methylcytidine-3'-phosphate
  modified_base 13: mod_base = OTHER; note = 2'-O-methyluridine-3'-phosphate
  modified_base 14: mod_base = OTHER; note = 2'-fluoroadenosine-3'-phosphate
  modified_base 15: mod_base = OTHER; note = 2'-O-methylcytidine-3'-phosphate
  modified_base 16: mod_base = OTHER; note = 2'-fluoroadenosine-3'-phosphate
  modified_base 17: mod_base = OTHER; note = 2'-O-methylcytidine-3'-phosphate
  modified_base 18: mod_base = OTHER; note = 2'-O-methylcytidine-3'-phosphate
  modified_base 19: mod_base = OTHER; note = 2'-O-methyladenosine-3'-phosphate
  modified_base 20: mod_base = OTHER; note = 2'-O-methyluridine-3'-phosphate
  modified_base 21: mod_base = OTHER; note = 2'-O-methyluridine-3'-phosphorothioate
  modified_base 22: mod_base = OTHER; note = 2'-O-methyladenosine-3'-phosphorothioate
  modified_base 23: mod_base = OTHER; note = 2'-O-methylcytidine-3'-phosphate
  misc_feature 1..4: note = RNA
  misc_feature 5: note = DNA
  misc_feature 6..23: note = RNA
taattagtgttctacaccattac

SEQ ID NO: 1317 - DNA, 23 bp, synthetic construct
  source 1..23: mol_type = other DNA
  modified_base 1: mod_base = OTHER; note = Vinyl-phosphonate-2'-O-methyluridine-3'-phosphate
  modified_base 2: mod_base = OTHER; note = 2'-fluorouridine-3'-phosphate
  modified_base 3: mod_base = OTHER; note = 2'-O-methyluridine-3'-phosphate
  modified_base 4: mod_base = OTHER; note = 2'-O-methyladenosine-3'-phosphate
  modified_base 6: mod_base = OTHER; note = 2'-O-methyladenosine-3'-phosphate
  modified_base 7: mod_base = OTHER; note = guanosine-2'-phosphate
  modified_base 8: mod_base = OTHER; note = 2'-O-methyluridine-3'-phosphate
  modified_base 9: mod_base = OTHER; note = 2'-O-methylguanosine-3'-phosphate
  modified_base 10: mod_base = OTHER; note = 2'-O-methyladenosine-3'-phosphate
  modified_base 11: mod_base = OTHER; note = 2'-O-methyluridine-3'-phosphate
  modified_base 12: mod_base = OTHER; note = 2'-O-methyluridine-3'-phosphate
  modified_base 13: mod_base = OTHER; note = 2'-O-methyladenosine-3'-phosphate
  modified_base 14: mod_base = OTHER; note = 2'-fluorouridine-3'-phosphate
  modified_base 15: mod_base = OTHER; note = 2'-O-methylguanosine-3'-phosphate
  modified_base 16: mod_base = OTHER; note = 2'-fluoroadenosine-3'-phosphate
  modified_base 17: mod_base = OTHER; note = 2'-O-methyladenosine-3'-phosphate
  modified_base 18: mod_base = OTHER; note = 2'-O-methyluridine-3'-phosphate
  modified_base 19: mod_base = OTHER; note = 2'-O-methyluridine-3'-phosphate
  modified_base 20: mod_base = OTHER; note = 2'-O-methyladenosine-3'-phosphate
  modified_base 21: mod_base = OTHER; note = 2'-O-methylguanosine-3'-phosphorothioate
  modified_base 22: mod_base = OTHER; note = 2'-O-methyluridine-3'-phosphorothioate
  modified_base 23: mod_base = OTHER; note = 2'-O-methylguanosine-3'-phosphate
  misc_feature 1..4: note = RNA
  misc_feature 5: note = DNA
  misc_feature 6..23: note = RNA
tttagagtgattatgaattagtg

SEQ ID NO: 1318 - DNA, 23 bp, synthetic construct
  source 1..23: mol_type = other DNA
  modified_base 1: mod_base = OTHER; note = Vinyl-phosphonate-2'-O-methyluridine-3'-phosphate
  modified_base 2: mod_base = OTHER; note = 2'-fluorocytidine-3'-phosphate
  modified_base 3: mod_base = OTHER; note = 2'-O-methyluridine-3'-phosphate
  modified_base 4: mod_base = OTHER; note = 2'-O-methyladenosine-3'-phosphate
  modified_base 6: mod_base = OTHER; note = 2'-O-methylcytidine-3'-phosphate
  modified_base 7: mod_base = OTHER; note = cytidine-2'-phosphate
  modified_base 8: mod_base = OTHER; note = 2'-O-methyladenosine-3'-phosphate
  modified_base 9: mod_base = OTHER; note = 2'-O-methyluridine-3'-phosphate
  modified_base 10: mod_base = OTHER; note = 2'-O-methyladenosine-3'-phosphate
  modified_base 11: mod_base = OTHER; note = 2'-O-methylcytidine-3'-phosphate
  modified_base 12: mod_base = OTHER; note = 2'-O-methyladenosine-3'-phosphate
  modified_base 13: mod_base = OTHER; note = 2'-O-methyluridine-3'-phosphate
  modified_base 14: mod_base = OTHER; note = 2'-fluoroadenosine-3'-phosphate
  modified_base 15: mod_base = OTHER; note = 2'-O-methyluridine-3'-phosphate
  modified_base 16: mod_base = OTHER; note = 2'-fluorocytidine-3'-phosphate
  modified_base 17: mod_base = OTHER; note = 2'-O-methylcytidine-3'-phosphate
  modified_base 18: mod_base = OTHER; note = 2'-O-methylcytidine-3'-phosphate
  modified_base 19: mod_base = OTHER; note = 2'-O-methyladenosine-3'-phosphate
  modified_base 20: mod_base = OTHER; note = 2'-O-methyladenosine-3'-phosphate
  modified_base 21: mod_base = OTHER; note = 2'-O-methyladenosine-3'-phosphorothioate
  modified_base 22: mod_base = OTHER; note = 2'-O-methyluridine-3'-phosphorothioate
  modified_base 23: mod_base = OTHER; note = 2'-O-methyladenosine-3'-phosphate
  misc_feature 1..4: note = RNA
  misc_feature 5: note = DNA
  misc_feature 6..23: note = RNA
tctacccatacatatcccaaata

SEQ ID NO: 1319 - DNA, 23 bp, synthetic construct
  source 1..23: mol_type = other DNA
  modified_base 1: mod_base = OTHER; note = Vinyl-phosphonate-2'-O-methyluridine-3'-phosphate
  modified_base 2: mod_base = OTHER; note = 2'-fluorocytidine-3'-phosphate
  modified_base 3: mod_base = OTHER; note = 2'-O-methyladenosine-3'-phosphate
  modified_base 4: mod_base = OTHER; note = 2'-O-methylcytidine-3'-phosphate
  modified_base 6: mod_base = OTHER; note = 2'-O-methyluridine-3'-phosphate
  modified_base 7: mod_base = OTHER; note = cytidine-2'-phosphate
  modified_base 8: mod_base = OTHER; note = 2'-O-methyluridine-3'-phosphate
  modified_base 9: mod_base = OTHER; note = 2'-O-methyluridine-3'-phosphate
  modified_base 10: mod_base = OTHER; note = 2'-O-methyladenosine-3'-phosphate
  modified_base 11: mod_base = OTHER; note = 2'-O-methylcytidine-3'-phosphate
  modified_base 12: mod_base = OTHER; note = 2'-O-methyluridine-3'-phosphate
  modified_base 13: mod_base = OTHER; note = 2'-O-methylguanosine-3'-phosphate
  modified_base 14: mod_base = OTHER; note = 2'-fluoroadenosine-3'-phosphate
  modified_base 15: mod_base = OTHER; note = 2'-O-methyluridine-3'-phosphate
  modified_base 16: mod_base = OTHER; note = 2'-fluorouridine-3'-phosphate
  modified_base 17: mod_base = OTHER; note = 2'-O-methyluridine-3'-phosphate
  modified_base 18: mod_base = OTHER; note = 2'-O-methyladenosine-3'-phosphate
  modified_base 19: mod_base = OTHER; note = 2'-O-methylcytidine-3'-phosphate
  modified_base 20: mod_base = OTHER; note = 2'-O-methylcytidine-3'-phosphate
  modified_base 21: mod_base = OTHER; note = 2'-O-methylcytidine-3'-phosphorothioate
  modified_base 22: mod_base = OTHER; note = 2'-O-methyluridine-3'-phosphorothioate
  modified_base 23: mod_base = OTHER; note = 2'-O-methyladenosine-3'-phosphate
  misc_feature 1..4: note = RNA
  misc_feature 5: note = DNA
  misc_feature 6..23: note = RNA
tcacctcttactgatttacccta

SEQ ID NO: 1320 - DNA, 23 bp, synthetic construct
  source 1..23: mol_type = other DNA
  modified_base 1: mod_base = OTHER; note = Vinyl-phosphonate-2'-O-methyluridine-3'-phosphate
  modified_base 2: mod_base = OTHER; note = 2'-fluoroadenosine-3'-phosphate
  modified_base 3: mod_base = OTHER; note = 2'-O-methyladenosine-3'-phosphate
  modified_base 4: mod_base = OTHER; note = 2'-O-methylcytidine-3'-phosphate
  modified_base 6: mod_base = OTHER; note = 2'-O-methylcytidine-3'-phosphate
  modified_base 7: mod_base = OTHER; note = cytidine-2'-phosphate
  modified_base 8: mod_base = OTHER; note = 2'-O-methyluridine-3'-phosphate
  modified_base 9: mod_base = OTHER; note = 2'-O-methylcytidine-3'-phosphate
  modified_base 10: mod_base = OTHER; note = 2'-O-methyluridine-3'-phosphate
  modified_base 11: mod_base = OTHER; note = 2'-O-methyluridine-3'-phosphate
  modified_base 12: mod_base = OTHER; note = 2'-O-methyladenosine-3'-phosphate
  modified_base 13: mod_base = OTHER; note = 2'-O-methylcytidine-3'-phosphate
  modified_base 14: mod_base = OTHER; note = 2'-fluorouridine-3'-phosphate
  modified_base 15: mod_base = OTHER; note = 2'-O-methylguanosine-3'-phosphate
  modified_base 16: mod_base = OTHER; note = 2'-fluoroadenosine-3'-phosphate
  modified_base 17: mod_base = OTHER; note = 2'-O-methyluridine-3'-phosphate
  modified_base 18: mod_base = OTHER; note = 2'-O-methyluridine-3'-phosphate
  modified_base 19: mod_base = OTHER; note = 2'-O-methyluridine-3'-phosphate
  modified_base 20: mod_base = OTHER; note = 2'-O-methyladenosine-3'-phosphate
  modified_base 21: mod_base = OTHER; note = 2'-O-methylcytidine-3'-phosphorothioate
  modified_base 22: mod_base = OTHER; note = 2'-O-methylcytidine-3'-phosphorothioate
  modified_base 23: mod_base = OTHER; note = 2'-O-methylcytidine-3'-phosphate
  misc_feature 1..4: note = RNA
  misc_feature 5: note = DNA
  misc_feature 6..23: note = RNA
taacacctcttactgatttaccc

SEQ ID NO: 1321 - DNA, 23 bp, synthetic construct
  source 1..23: mol_type = other DNA
  modified_base 1: mod_base = OTHER; note = Vinyl-phosphonate-2'-O-methyluridine-3'-phosphate
  modified_base 2: mod_base = OTHER; note = 2'-fluorouridine-3'-phosphate
  modified_base 3: mod_base = OTHER; note = 2'-O-methyladenosine-3'-phosphate
  modified_base 4: mod_base = OTHER; note = 2'-O-methyladenosine-3'-phosphate
  modified_base 6: mod_base = OTHER; note = 2'-O-methyladenosine-3'-phosphate
  modified_base 7: mod_base = OTHER; note = cytidine-2'-phosphate
  modified_base 8: mod_base = OTHER; note = 2'-O-methylcytidine-3'-phosphate
  modified_base 9: mod_base = OTHER; note = 2'-O-methyluridine-3'-phosphate
  modified_base 10: mod_base = OTHER; note = 2'-O-methylcytidine-3'-phosphate
  modified_base 11: mod_base = OTHER; note = 2'-O-methyluridine-3'-phosphate
  modified_base 12: mod_base = OTHER; note = 2'-O-methyluridine-3'-phosphate
  modified_base 13: mod_base = OTHER; note = 2'-O-methyladenosine-3'-phosphate
  modified_base 14: mod_base = OTHER; note = 2'-fluorocytidine-3'-phosphate
  modified_base 15: mod_base = OTHER; note = 2'-O-methyluridine-3'-phosphate
  modified_base 16: mod_base = OTHER; note = 2'-fluoroguanosine-3'-phosphate
  modified_base 17: mod_base = OTHER; note = 2'-O-methyladenosine-3'-phosphate
  modified_base 18: mod_base = OTHER; note = 2'-O-methyluridine-3'-phosphate
  modified_base 19: mod_base = OTHER; note = 2'-O-methyluridine-3'-phosphate
  modified_base 20: mod_base = OTHER; note = 2'-O-methyluridine-3'-phosphate
  modified_base 21: mod_base = OTHER; note = 2'-O-methyladenosine-3'-phosphorothioate
  modified_base 22: mod_base = OTHER; note = 2'-O-methylcytidine-3'-phosphorothioate
  modified_base 23: mod_base = OTHER; note = 2'-O-methylcytidine-3'-phosphate
  misc_feature 1..4: note = RNA
  misc_feature 5: note = DNA
  misc_feature 6..23: note = RNA
ttaacacctcttactgatttacc

SEQ ID NO: 1322 - DNA, 23 bp, synthetic construct
  source 1..23: mol_type = other DNA
  modified_base 1: mod_base = OTHER; note = Vinyl-phosphonate-2'-O-methyluridine-3'-phosphate
  modified_base 2: mod_base = OTHER; note = 2'-fluoroadenosine-3'-phosphate
  modified_base 3: mod_base = OTHER; note = 2'-O-methyladenosine-3'-phosphate
  modified_base 4: mod_base = OTHER; note = 2'-O-methyluridine-3'-phosphate
  modified_base 6: mod_base = OTHER; note = 2'-O-methyladenosine-3'-phosphate
  modified_base 7: mod_base = OTHER; note = cytidine-2'-phosphate
  modified_base 8: mod_base = OTHER; note = 2'-O-methyladenosine-3'-phosphate
  modified_base 9: mod_base = OTHER; note = 2'-O-methylcytidine-3'-phosphate
  modified_base 10: mod_base = OTHER; note = 2'-O-methylcytidine-3'-phosphate
  modified_base 11: mod_base = OTHER; note = 2'-O-methyluridine-3'-phosphate
  modified_base 12: mod_base = OTHER; note = 2'-O-methylcytidine-3'-phosphate
  modified_base 13: mod_base = OTHER; note = 2'-O-methyluridine-3'-phosphate
  modified_base 14: mod_base = OTHER; note = 2'-fluorouridine-3'-phosphate
  modified_base 15: mod_base = OTHER; note = 2'-O-methyladenosine-3'-phosphate
  modified_base 16: mod_base = OTHER; note = 2'-fluorocytidine-3'-phosphate
  modified_base 17: mod_base = OTHER; note = 2'-O-methyluridine-3'-phosphate
  modified_base 18: mod_base = OTHER; note = 2'-O-methylguanosine-3'-phosphate
  modified_base 19: mod_base = OTHER; note = 2'-O-methyladenosine-3'-phosphate
  modified_base 20: mod_base = OTHER; note = 2'-O-methyluridine-3'-phosphate
  modified_base 21: mod_base = OTHER; note = 2'-O-methyluridine-3'-phosphorothioate
  modified_base 22: mod_base = OTHER; note = 2'-O-methyluridine-3'-phosphorothioate
  modified_base 23: mod_base = OTHER; note = 2'-O-methyladenosine-3'-phosphate
  misc_feature 1..4: note = RNA
  misc_feature 5: note = DNA
  misc_feature 6..23: note = RNA
taataacacctcttactgattta

SEQ ID NO: 1323 - RNA, 23 nt, Homo sapiens
  source 1..23: mol_type = genomic RNA
ctgagggtatttgaagtatacca

SEQ ID NO: 1324 - RNA, 23 nt, Homo sapiens
  source 1..23: mol_type = genomic RNA
gagggtatttgaagtataccata

SEQ ID NO: 1325 - RNA, 23 nt, Homo sapiens
  source 1..23: mol_type = genomic RNA
agggtatttgaagtataccatac

SEQ ID NO: 1326 - RNA, 23 nt, Homo sapiens
  source 1..23: mol_type = genomic RNA
tatttgaagtataccatacaact

SEQ ID NO: 1327 - RNA, 23 nt, Homo sapiens
  source 1..23: mol_type = genomic RNA
atttgaagtataccatacaactg

SEQ ID NO: 1328 - RNA, 23 nt, Homo sapiens
  source 1..23: mol_type = genomic RNA
cgtggacaatggctactcaagct

SEQ ID NO: 1329 - RNA, 23 nt, Homo sapiens
  source 1..23: mol_type = genomic RNA
tggacaatggctactcaagctga

SEQ ID NO: 1330 - RNA, 23 nt, Homo sapiens
  source 1..23: mol_type = genomic RNA
ggacaatggctactcaagctgat

SEQ ID NO: 1331 - RNA, 23 nt, Homo sapiens
  source 1..23: mol_type = genomic RNA
tcaagctgatttgatggagttgg

SEQ ID NO: 1332 - RNA, 23 nt, Homo sapiens
  source 1..23: mol_type = genomic RNA
caagctgatttgatggagttgga

SEQ ID NO: 1333 - RNA, 23 nt, Homo sapiens
  source 1..23: mol_type = genomic RNA
ctccttctctgagtggtaaaggc

SEQ ID NO: 1334 - RNA, 23 nt, Homo sapiens
  source 1..23: mol_type = genomic RNA
ctcagtccttcactcaagaacaa

SEQ ID NO: 1335 - RNA, 23 nt, Homo sapiens
  source 1..23: mol_type = genomic RNA
tccttcactcaagaacaagtagc

SEQ ID NO: 1336 - RNA, 23 nt, Homo sapiens
  source 1..23: mol_type = genomic RNA
ttcactcaagaacaagtagctga

SEQ ID NO: 1337 - RNA, 23 nt, Homo sapiens
  source 1..23: mol_type = genomic RNA
aagtagctgatattgatggacag

SEQ ID NO: 1338 - RNA, 23 nt, Homo sapiens
  source 1..23: mol_type = genomic RNA
atattgatggacagtatgcaatg

SEQ ID NO: 1339 - RNA, 23 nt, Homo sapiens
  source 1..23: mol_type = genomic RNA
acagtatgcaatgactcgagctc

SEQ ID NO: 1340 - RNA, 23 nt, Homo sapiens
  source 1..23: mol_type = genomic RNA
agggtacgagctgctatgttccc

SEQ ID NO: 1341 - RNA, 23 nt, Homo sapiens
  source 1..23: mol_type = genomic RNA
gtacgagctgctatgttccctga

SEQ ID NO: 1342 - RNA, 23 nt, Homo sapiens
  source 1..23: mol_type = genomic RNA
tatgttccctgagacattagatg

SEQ ID NO: 1343 - RNA, 23 nt, Homo sapiens
  source 1..23: mol_type = genomic RNA
tgttccctgagacattagatgag

SEQ ID NO: 1344 - RNA, 23 nt, Homo sapiens
  source 1..23: mol_type = genomic RNA
ttagatgagggcatgcagatccc

SEQ ID NO: 1345 - RNA, 23 nt, Homo sapiens
  source 1..23: mol_type = genomic RNA
tgctgctcatcccactaatgtcc

SEQ ID NO: 1346 - RNA, 23 nt, Homo sapiens
  source 1..23: mol_type = genomic RNA
gaaccatcacagatgctgaaaca

SEQ ID NO: 1347 - RNA, 23 nt, Homo sapiens
  source 1..23: mol_type = genomic RNA
accatcacagatgctgaaacatg

SEQ ID NO: 1348 - RNA, 23 nt, Homo sapiens
  source 1..23: mol_type = genomic RNA
agatgctgaaacatgcagttgta

SEQ ID NO: 1349 - RNA, 23 nt, Homo sapiens
  source 1..23: mol_type = genomic RNA
aaacatgcagttgtaaacttgat

SEQ ID NO: 1350 - RNA, 23 nt, Homo sapiens
  source 1..23: mol_type = genomic RNA
acatgcagttgtaaacttgatta

SEQ ID NO: 1351 - RNA, 23 nt, Homo sapiens
  source 1..23: mol_type = genomic RNA
acacgtgcaatccctgaactgac

SEQ ID NO: 1352 - RNA, 23 nt, Homo sapiens
  source 1..23: mol_type = genomic RNA
cgtgcaatccctgaactgacaaa

SEQ ID NO: 1353 - RNA, 23 nt, Homo sapiens
  source 1..23: mol_type = genomic RNA
aggaccaggtggtggttaataag

SEQ ID NO: 1354 - RNA, 23 nt, Homo sapiens
  source 1..23: mol_type = genomic RNA
gaccaggtggtggttaataaggc

SEQ ID NO: 1355 - RNA, 23 nt, Homo sapiens
  source 1..23: mol_type = genomic RNA
tggttaataaggctgcagttatg

SEQ ID NO: 1356 - RNA, 23 nt, Homo sapiens
  source 1..23: mol_type = genomic RNA
ctcctcagatggtgtctgctatt

SEQ ID NO: 1357 - RNA, 23 nt, Homo sapiens
  source 1..23: mol_type = genomic RNA
cctcagatggtgtctgctattgt

SEQ ID NO: 1358 - RNA, 23 nt, Homo sapiens
  source 1..23: mol_type = genomic RNA
tcagatggtgtctgctattgtac

SEQ ID NO: 1359 - RNA, 23 nt, Homo sapiens
  source 1..23: mol_type = genomic RNA
gtacgtaccatgcagaatacaaa

SEQ ID NO: 1360 - RNA, 23 nt, Homo sapiens
  source 1..23: mol_type = genomic RNA
tacgtaccatgcagaatacaaat

SEQ ID NO: 1361 - RNA, 23 nt, Homo sapiens
  source 1..23: mol_type = genomic RNA
acgtaccatgcagaatacaaatg

SEQ ID NO: 1362 - RNA, 23 nt, Homo sapiens
  source 1..23: mol_type = genomic RNA
cgtaccatgcagaatacaaatga

SEQ ID NO: 1363 - RNA, 23 nt, Homo sapiens
  source 1..23: mol_type = genomic RNA
gtaccatgcagaatacaaatgat

SEQ ID NO: 1364 - RNA, 23 nt, Homo sapiens
  source 1..23: mol_type = genomic RNA
taccatgcagaatacaaatgatg

SEQ ID NO: 1365 - RNA, 23 nt, Homo sapiens
  source 1..23: mol_type = genomic RNA
accatgcagaatacaaatgatgt

SEQ ID NO: 1366 - RNA, 23 nt, Homo sapiens
  source 1..23: mol_type = genomic RNA
ccatgcagaatacaaatgatgta

SEQ ID NO: 1367 - RNA, 23 nt, Homo sapiens
  source 1..23: mol_type = genomic RNA
atgcagaatacaaatgatgtaga

SEQ ID NO: 1368 - RNA, 23 nt, Homo sapiens
  source 1..23: mol_type = genomic RNA
tgcagaatacaaatgatgtagaa

SEQ ID NO: 1369 - RNA, 23 nt, Homo sapiens
  source 1..23: mol_type = genomic RNA
aatgatgtagaaacagctcgttg

SEQ ID NO: 1370 - RNA, 23 nt, Homo sapiens
  source 1..23: mol_type = genomic RNA
atgatgtagaaacagctcgttgt

SEQ ID NO: 1371 - RNA, 23 nt, Homo sapiens
  source 1..23: mol_type = genomic RNA
ttactggccatctttaagtctgg

SEQ ID NO: 1372 - RNA, 23 nt, Homo sapiens
  source 1..23: mol_type = genomic RNA
tactggccatctttaagtctgga

SEQ ID NO: 1373 - RNA, 23 nt, Homo sapiens
  source 1..23: mol_type = genomic RNA
actggccatctttaagtctggag

SEQ ID NO: 1374 - RNA, 23 nt, Homo sapiens
  source 1..23: mol_type = genomic RNA
ctggccatctttaagtctggagg

SEQ ID NO: 1375 - RNA, 23 nt, Homo sapiens
  source 1..23: mol_type = genomic RNA
tggccatctttaagtctggaggc

SEQ ID NO: 1376 - RNA, 23 nt, Homo sapiens
  source 1..23: mol_type = genomic RNA
cttggttcaccagtggattctgt

SEQ ID NO: 1377 - RNA, 23 nt, Homo sapiens
  source 1..23: mol_type = genomic RNA
tcaccagtggattctgtgttgtt

SEQ ID NO: 1378 - RNA, 23 nt, Homo sapiens
  source 1..23: mol_type = genomic RNA
aaatggcagtgcgtttagctggt

SEQ ID NO: 1379 - RNA, 23 nt, Homo sapiens
  source 1..23: mol_type = genomic RNA
ggttgccttgctcaacaaaacaa

SEQ ID NO: 1380 - RNA, 23 nt, Homo sapiens
  source 1..23: mol_type = genomic RNA
gttgccttgctcaacaaaacaaa

SEQ ID NO: 1381 - RNA, 23 nt, Homo sapiens
  source 1..23: mol_type = genomic RNA
ttgccttgctcaacaaaacaaat

SEQ ID NO: 1382 - RNA, 23 nt, Homo sapiens
  source 1..23: mol_type = genomic RNA
tgttaaattcttggctattacga

SEQ ID NO: 1383 - RNA, 23 nt, Homo sapiens
  source 1..23: mol_type = genomic RNA
aaattcttggctattacgacaga

SEQ ID NO: 1384 - RNA, 23 nt, Homo sapiens
  source 1..23: mol_type = genomic RNA
ttggctattacgacagactgcct

SEQ ID NO: 1385 - RNA, 23 nt, Homo sapiens
  source 1..23: mol_type = genomic RNA
attacgacagactgccttcaaat

SEQ ID NO: 1386 - RNA, 23 nt, Homo sapiens
  source 1..23: mol_type = genomic RNA
agctttagtaaatataatgagga

SEQ ID NO: 1387 - RNA, 23 nt, Homo sapiens
  source 1..23: mol_type = genomic RNA
aatataatgaggacctatactta

SEQ ID NO: 1388 - RNA, 23 nt, Homo sapiens
  source 1..23: mol_type = genomic RNA
gaagctggtggaatgcaagcttt

SEQ ID NO: 1389 - RNA, 23 nt, Homo sapiens
  source 1..23: mol_type = genomic RNA
gacagatccaagtcaacgtcttg

SEQ ID NO: 1390 - RNA, 23 nt, Homo sapiens
  source 1..23: mol_type = genomic RNA
atccaagtcaacgtcttgttcag

SEQ ID NO: 1391 - RNA, 23 nt, Homo sapiens
  source 1..23: mol_type = genomic RNA
tcagaactgtctttggactctca

SEQ ID NO: 1392 - RNA, 23 nt, Homo sapiens
  source 1..23: mol_type = genomic RNA
atctttcagatgctgcaactaaa

SEQ ID NO: 1393 - RNA, 23 nt, Homo sapiens
  source 1..23: mol_type = genomic RNA
tttcagatgctgcaactaaacag

SEQ ID NO: 1394 - RNA, 23 nt, Homo sapiens
  source 1..23: mol_type = genomic RNA
cagatgctgcaactaaacaggaa

SEQ ID NO: 1395 - RNA, 23 nt, Homo sapiens
  source 1..23: mol_type = genomic RNA
tgctgcaactaaacaggaaggga

SEQ ID NO: 1396 - RNA, 23 nt, Homo sapiens
  source 1..23: mol_type = genomic RNA
aggaagggatggaaggtctcctt

SEQ ID NO: 1397 - RNA, 23 nt, Homo sapiens
  source 1..23: mol_type = genomic RNA
agcttctgggttcagatgatata

SEQ ID NO: 1398 - RNA, 23 nt, Homo sapiens
  source 1..23: mol_type = genomic RNA
cacctgtgcagctggaattcttt

SEQ ID NO: 1399 - RNA, 23 nt, Homo sapiens
  source 1..23: mol_type = genomic RNA
cctgtgcagctggaattctttct

SEQ ID NO: 1400 - RNA, 23 nt, Homo sapiens
  source 1..23: mol_type = genomic RNA
ggaattctttctaacctcacttg

SEQ ID NO: 1401 - RNA, 23 nt, Homo sapiens
  source 1..23: mol_type = genomic RNA
aattctttctaacctcacttgca

SEQ ID NO: 1402 - RNA, 23 nt, Homo sapiens
  source 1..23: mol_type = genomic RNA
ttctttctaacctcacttgcaat

SEQ ID NO: 1403 - RNA, 23 nt, Homo sapiens
  source 1..23: mol_type = genomic RNA
tctttctaacctcacttgcaata

SEQ ID NO: 1404 - RNA, 23 nt, Homo sapiens
  source 1..23: mol_type = genomic RNA
ttctaacctcacttgcaataatt

SEQ ID NO: 1405 - RNA, 23 nt, Homo sapiens
  source 1..23: mol_type = genomic RNA
tctaacctcacttgcaataatta

SEQ ID NO: 1406 - RNA, 23 nt, Homo sapiens
  source 1..23: mol_type = genomic RNA
ctaacctcacttgcaataattat

SEQ ID NO: 1407 - RNA, 23 nt, Homo sapiens
  source 1..23: mol_type = genomic RNA
taacctcacttgcaataattata

SEQ ID NO: 1408 - RNA, 23 nt, Homo sapiens
  source 1..23: mol_type = genomic RNA
aacctcacttgcaataattataa

SEQ ID NO: 1409 - RNA, 23 nt, Homo sapiens
  source 1..23: mol_type = genomic RNA
acctcacttgcaataattataag

SEQ ID NO: 1410 - RNA, 23 nt, Homo sapiens
  source 1..23: mol_type = genomic RNA
cctcacttgcaataattataaga

SEQ ID NO: 1411 - RNA, 23 nt, Homo sapiens
  source 1..23: mol_type = genomic RNA
ctcacttgcaataattataagaa

SEQ ID NO: 1412 - RNA, 23 nt, Homo sapiens
  source 1..23: mol_type = genomic RNA
gccaagtgggtggtatagaggct

SEQ ID NO: 1413 - RNA, 23 nt, Homo sapiens
  source 1..23: mol_type = genomic RNA
aggctcttgtgcgtactgtcctt

SEQ ID NO: 1414 - RNA, 23 nt, Homo sapiens
  source 1..23: mol_type = genomic RNA
agcctgccatctgtgctcttcgt

SEQ ID NO: 1415 - RNA, 23 nt, Homo sapiens
  source 1..23: mol_type = genomic RNA
gcctgccatctgtgctcttcgtc

SEQ ID NO: 1416 - RNA, 23 nt, Homo sapiens
  source 1..23: mol_type = genomic RNA
cctgccatctgtgctcttcgtca

SEQ ID NO: 1417 - RNA, 23 nt, Homo sapiens
  source 1..23: mol_type = genomic RNA
ctgccatctgtgctcttcgtcat

SEQ ID NO: 1418 - RNA, 23 nt, Homo sapiens
  source 1..23: mol_type = genomic RNA
tgccatctgtgctcttcgtcatc

SEQ ID NO: 1419 - RNA, 23 nt, Homo sapiens
  source 1..23: mol_type = genomic RNA
ccatctgtgctcttcgtcatctg

SEQ ID NO: 1420 - RNA, 23 nt, Homo sapiens
  source 1..23: mol_type = genomic RNA
catctgtgctcttcgtcatctga

SEQ ID NO: 1421 - RNA, 23 nt, Homo sapiens
  source 1..23: mol_type = genomic RNA
atctgtgctcttcgtcatctgac

SEQ ID NO: 1422 - RNA, 23 nt, Homo sapiens
  source 1..23: mol_type = genomic RNA
tctgtgctcttcgtcatctgacc

SEQ ID NO: 1423 - RNA, 23 nt, Homo sapiens
  source 1..23: mol_type = genomic RNA
tatggactaccagttgtggttaa

SEQ ID NO: 1424 - RNA, 23 nt, Homo sapiens
  source 1..23: mol_type = genomic RNA
tggactaccagttgtggttaagc

SEQ ID NO: 1425 - RNA, 23 nt, Homo sapiens
  source 1..23: mol_type = genomic RNA
gttgtggttaagctcttacaccc

SEQ ID NO: 1426 - RNA, 23 nt, Homo sapiens
  source 1..23: mol_type = genomic RNA
ctgataaaggctactgttggatt

SEQ ID NO: 1427 - RNA, 23 nt, Homo sapiens
  source 1..23: mol_type = genomic RNA
tgataaaggctactgttggattg

SEQ ID NO: 1428 - RNA, 23 nt, Homo sapiens
  source 1..23: mol_type = genomic RNA
taaaggctactgttggattgatt

SEQ ID NO: 1429 - RNA, 23 nt, Homo sapiens
  source 1..23: mol_type = genomic RNA
aaaggctactgttggattgattc

SEQ ID NO: 1430 - RNA, 23 nt, Homo sapiens
  source 1..23: mol_type = genomic RNA
aaggctactgttggattgattcg

SEQ ID NO: 1431 - RNA, 23 nt, Homo sapiens
  source 1..23: mol_type = genomic RNA
aggctactgttggattgattcga

SEQ ID NO: 1432 - RNA, 23 nt, Homo sapiens
  source 1..23: mol_type = genomic RNA
ggctactgttggattgattcgaa

SEQ ID NO: 1433 - RNA, 23 nt, Homo sapiens
  source 1..23: mol_type = genomic RNA
gctactgttggattgattcgaaa

SEQ ID NO: 1434 - RNA, 23 nt, Homo sapiens
  source 1..23: mol_type = genomic RNA
ctactgttggattgattcgaaat

SEQ ID NO: 1435 - RNA, 23 nt, Homo sapiens
  source 1..23: mol_type = genomic RNA
tactgttggattgattcgaaatc

SEQ ID NO: 1436 - RNA, 23 nt, Homo sapiens
  source 1..23: mol_type = genomic RNA
ctgttggattgattcgaaatctt

SEQ ID NO: 1437 - RNA, 23 nt, Homo sapiens
  source 1..23: mol_type = genomic RNA
tgttggattgattcgaaatcttg

SEQ ID NO: 1438 - RNA, 23 nt, Homo sapiens
  source 1..23: mol_type = genomic RNA
ttggattgattcgaaatcttgcc

SEQ ID NO: 1439 - RNA, 23 nt, Homo sapiens
  source 1..23: mol_type = genomic RNA
gattgattcgaaatcttgccctt

SEQ ID NO: 1440 - RNA, 23 nt, Homo sapiens
  source 1..23: mol_type = genomic RNA
ccattccacgactagttcagttg

SEQ ID NO: 1441 - RNA, 23 nt, Homo sapiens
  source 1..23: mol_type = genomic RNA
ttccacgactagttcagttgctt

SEQ ID NO: 1442 - RNA, 23 nt, Homo sapiens
  source 1..23: mol_type = genomic RNA
agttcagttgcttgttcgtgcac

SEQ ID NO: 1443 - RNA, 23 nt, Homo sapiens
  source 1..23: mol_type = genomic RNA
tgggacacagcagcaatttgtgg

SEQ ID NO: 1444 - RNA, 23 nt, Homo sapiens
  source 1..23: mol_type = genomic RNA
acatcctagctcgggatgttcac

SEQ ID NO: 1445 - RNA, 23 nt, Homo sapiens
  source 1..23: mol_type = genomic RNA
ctagctcgggatgttcacaaccg

SEQ ID NO: 1446 - RNA, 23 nt, Homo sapiens
  source 1..23: mol_type = genomic RNA
gggatgttcacaaccgaattgtt

SEQ ID NO: 1447 - RNA, 23 nt, Homo sapiens
  source 1..23: mol_type = genomic RNA
gttatcagaggactaaataccat

SEQ ID NO: 1448 - RNA, 23 nt, Homo sapiens
  source 1..23: mol_type = genomic RNA
ttatcagaggactaaataccatt

SEQ ID NO: 1449 - RNA, 23 nt, Homo sapiens
  source 1..23: mol_type = genomic RNA
tatcagaggactaaataccattc

SEQ ID NO: 1450 - RNA, 23 nt, Homo sapiens
  source 1..23: mol_type = genomic RNA
cagaggactaaataccattccat

SEQ ID NO: 1451 - RNA, 23 nt, Homo sapiens
  source 1..23: mol_type = genomic RNA
gaggactaaataccattccattg

SEQ ID NO: 1452 - RNA, 23 nt, Homo sapiens
  source 1..23: mol_type = genomic RNA
ggactaaataccattccattgtt

SEQ ID NO: 1453 - RNA, 23 nt, Homo sapiens
  source 1..23: mol_type = genomic RNA
gactaaataccattccattgttt

SEQ ID NO: 1454 - RNA, 23 nt, Homo sapiens
  source 1..23: mol_type = genomic RNA
actaaataccattccattgtttg

SEQ ID NO: 1455 - RNA, 23 nt, Homo sapiens
  source 1..23: mol_type = genomic RNA
ctaaataccattccattgtttgt

SEQ ID NO: 1456 - RNA, 23 nt, Homo sapiens
  source 1..23: mol_type = genomic RNA
taaataccattccattgtttgtg

SEQ ID NO: 1457 - RNA, 23 nt, Homo sapiens
  source 1..23: mol_type = genomic RNA
aaataccattccattgtttgtgc

SEQ ID NO: 1458 - RNA, 23 nt, Homo sapiens
  source 1..23: mol_type = genomic RNA
aataccattccattgtttgtgca

SEQ ID NO: 1459 - RNA, 23 nt, Homo sapiens
  source 1..23: mol_type = genomic RNA
ataccattccattgtttgtgcag

SEQ ID NO: 1460 - RNA, 23 nt, Homo sapiens
  source 1..23: mol_type = genomic RNA
taccattccattgtttgtgcagc

SEQ ID NO: 1461 - RNA, 23 nt, Homo sapiens
  source 1..23: mol_type = genomic RNA
accattccattgtttgtgcagct

SEQ ID NO: 1462 - RNA, 23 nt, Homo sapiens
  source 1..23: mol_type = genomic RNA
attccattgtttgtgcagctgct

SEQ ID NO: 1463 - RNA, 23 nt, Homo sapiens
  source 1..23: mol_type = genomic RNA
ttgtttgtgcagctgctttattc

SEQ ID NO: 1464 - RNA, 23 nt, Homo sapiens
  source 1..23: mol_type = genomic RNA
agctcctctgacagagttacttc

SEQ ID NO: 1465 - RNA, 23 nt, Homo sapiens
  source 1..23: mol_type = genomic RNA
ctgacagagttacttcactctag

SEQ ID NO: 1466 - RNA, 23 nt, Homo sapiens
  source 1..23: mol_type = genomic RNA
agagttacttcactctaggaatg

SEQ ID NO: 1467 - RNA, 23 nt, Homo sapiens
  source 1..23: mol_type = genomic RNA
ctgaggacaagccacaagattac

SEQ ID NO: 1468 - RNA, 23 nt, Homo sapiens
  source 1..23: mol_type = genomic RNA
gccacaagattacaagaaacggc

SEQ ID NO: 1469 - RNA, 23 nt, Homo sapiens
  source 1..23: mol_type = genomic RNA
ccacaagattacaagaaacggct

SEQ ID NO: 1470 - RNA, 23 nt, Homo sapiens
  source 1..23: mol_type = genomic RNA
cacaagattacaagaaacggctt

SEQ ID NO: 1471 - RNA, 23 nt, Homo sapiens
  source 1..23: mol_type = genomic RNA
acaagattacaagaaacggcttt

SEQ ID NO: 1472 - RNA, 23 nt, Homo sapiens
  source 1..23: mol_type = genomic RNA
gattacaagaaacggctttcagt

SEQ ID NO: 1473 - RNA, 23 nt, Homo sapiens
  source 1..23: mol_type = genomic RNA
attacaagaaacggctttcagtt

SEQ ID NO: 1474 - RNA, 23 nt, Homo sapiens
  source 1..23: mol_type = genomic RNA
agaaacggctttcagttgagctg

SEQ ID NO: 1475 - RNA, 23 nt, Homo sapiens
  source 1..23: mol_type = genomic RNA
cggctttcagttgagctgaccag

SEQ ID NO: 1476 - RNA, 23 nt, Homo sapiens
  source 1..23: mol_type = genomic RNA
atcttggacttgatattggtgcc

SEQ ID NO: 1477 - RNA, 23 nt, Homo sapiens
  source 1..23: mol_type = genomic RNA
gatatcgccaggatgatcctagc

SEQ ID NO: 1478 - RNA, 23 nt, Homo sapiens
  source 1..23: mol_type = genomic RNA
gccaccaccctggtgctgactat

SEQ ID NO: 1479 - RNA, 23 nt, Homo sapiens
  source 1..23: mol_type = genomic RNA
caatcagctggcctggtttgata

SEQ ID NO: 1480 - RNA, 23 nt, Homo sapiens
  source 1..23: mol_type = genomic RNA
aatcagctggcctggtttgatac

SEQ ID NO: 1481 - RNA, 23 nt, Homo sapiens
  source 1..23: mol_type = genomic RNA
agctggcctggtttgatactgac

SEQ ID NO: 1482 - RNA, 23 nt, Homo sapiens
  source 1..23: mol_type = genomic RNA
acctgtaaatcatcctttaggta

SEQ ID NO: 1483 - RNA, 23 nt, Homo sapiens
  source 1..23: mol_type = genomic RNA
cctgtaaatcatcctttaggtaa

SEQ ID NO: 1484 - RNA, 23 nt, Homo sapiens
  source 1..23: mol_type = genomic RNA
agaaagacttggttggtagggtg

SEQ ID NO: 1485 - RNA, 23 nt, Homo sapiens
  source 1..23: mol_type = genomic RNA
atactttgaaaggagatgtcttg

SEQ ID NO: 1486 - RNA, 23 nt, Homo sapiens
  source 1..23: mol_type = genomic RNA
tgttctcagatttctggttgtta

SEQ ID NO: 1487 - RNA, 23 nt, Homo sapiens
  source 1..23: mol_type = genomic RNA
gttctcagatttctggttgttat

SEQ ID NO: 1488 - RNA, 23 nt, Homo sapiens
  source 1..23: mol_type = genomic RNA
ttctcagatttctggttgttatg

SEQ ID NO: 1489 - RNA, 23 nt, Homo sapiens
  source 1..23: mol_type = genomic RNA
tggttgttatgtgatcatgtgtg

SEQ ID NO: 1490 - RNA, 23 nt, Homo sapiens
  source 1..23: mol_type = genomic RNA
ggttgttatgtgatcatgtgtgg

SEQ ID NO: 1491 - RNA, 23 nt, Homo sapiens
  source 1..23: mol_type = genomic RNA
atgtgatcatgtgtggaagttat

SEQ ID NO: 1492 - RNA, 23 nt, Homo sapiens
  source 1..23: mol_type = genomic RNA
gtgatcatgtgtggaagttatta

SEQ ID NO: 1493 - RNA, 23 nt, Homo sapiens
  source 1..23: mol_type = genomic RNA
tgatcatgtgtggaagttattaa

SEQ ID NO: 1494 - RNA, 23 nt, Homo sapiens
  source 1..23: mol_type = genomic RNA
tttgcaacttaatactcaaatga

SEQ ID NO: 1495 - RNA, 23 nt, Homo sapiens
  source 1..23: mol_type = genomic RNA
agcctttctctctttatacagct

SEQ ID NO: 1496 - RNA, 23 nt, Homo sapiens
  source 1..23: mol_type = genomic RNA
tctttatacagctgtattgtctg

SEQ ID NO: 1497 - RNA, 23 nt, Homo sapiens
  source 1..23: mol_type = genomic RNA
gtattgtctgaacttgcattgtg

SEQ ID NO: 1498 - RNA, 23 nt, Homo sapiens
  source 1..23: mol_type = genomic RNA
gattggcctgtagagttgctgag

SEQ ID NO: 1499 - RNA, 23 nt, Homo sapiens
  source 1..23: mol_type = genomic RNA
aaagtgcctgacacactaaccaa

SEQ ID NO: 1500 - RNA, 23 nt, Homo sapiens
  source 1..23: mol_type = genomic RNA
gcctgacacactaaccaagctga

SEQ ID NO: 1501 - RNA, 23 nt, Homo sapiens
  source 1..23: mol_type = genomic RNA
actaaccaagctgagtttcctat

SEQ ID NO: 1502 - RNA, 23 nt, Homo sapiens
  source 1..23: mol_type = genomic RNA
caagctgagtttcctatgggaac

SEQ ID NO: 1503 - RNA, 23 nt, Homo sapiens
  source 1..23: mol_type = genomic RNA
agtttcctatgggaacaattgaa

SEQ ID NO: 1504 - RNA, 23 nt, Homo sapiens
  source 1..23: mol_type = genomic RNA
tggtcgaggagtaacaatacaaa

SEQ ID NO: 1505 - RNA, 23 nt, Homo sapiens
  source 1..23: mol_type = genomic RNA
ttatcaaaccctagccttgcttg

SEQ ID NO: 1506 - RNA, 23 nt, Homo sapiens
  source 1..23: mol_type = genomic RNA
actttgcttgctttgaagtagct

SEQ ID NO: 1507 - RNA, 23 nt, Homo sapiens
  source 1..23: mol_type = genomic RNA
tttgcttgctttgaagtagctct

SEQ ID NO: 1508 - RNA, 23 nt, Homo sapiens
  source 1..23: mol_type = genomic RNA
ttgcttgctttgaagtagctctt

SEQ ID NO: 1509 - RNA, 23 nt, Homo sapiens
  source 1..23: mol_type = genomic RNA
ttaagtctctcgtagtgttaagt

SEQ ID NO: 1510 - RNA, 23 nt, Homo sapiens
  source 1..23: mol_type = genomic RNA
agtctctcgtagtgttaagttat

SEQ ID NO: 1511 - RNA, 23 nt, Homo sapiens
  source 1..23: mol_type = genomic RNA
gtctctcgtagtgttaagttata

SEQ ID NO: 1512 - RNA, 23 nt, Homo sapiens
  source 1..23: mol_type = genomic RNA
ctctcgtagtgttaagttatagt

SEQ ID NO: 1513 - RNA, 23 nt, Homo sapiens
  source 1..23: mol_type = genomic RNA
ctcgtagtgttaagttatagtga

SEQ ID NO: 1514 - RNA, 23 nt, Homo sapiens
  source 1..23: mol_type = genomic RNA
cgtagtgttaagttatagtgaat

SEQ ID NO: 1515 - RNA, 23 nt, Homo sapiens
  source 1..23: mol_type = genomic RNA
tagtgaatactgctacagcaatt

SEQ ID NO: 1516 - RNA, 23 nt, Homo sapiens
  source 1..23: mol_type = genomic RNA
tactgctacagcaatttctaatt

SEQ ID NO: 1517 - RNA, 23 nt, Homo sapiens
  source 1..23: mol_type = genomic RNA
aagaattgagtaatggtgtagaa

SEQ ID NO: 1518 - RNA, 23 nt, Homo sapiens
  source 1..23: mol_type = genomic RNA
aattgagtaatggtgtagaacac

SEQ ID NO: 1519 - RNA, 23 nt, Homo sapiens
  source 1..23: mol_type = genomic RNA
ttgagtaatggtgtagaacacta

SEQ ID NO: 1520 - RNA, 23 nt, Homo sapiens
  source 1..23: mol_type = genomic RNA
tgagtaatggtgtagaacactaa

SEQ ID NO: 1521 - RNA, 23 nt, Homo sapiens
  source 1..23: mol_type = genomic RNA
agtaatggtgtagaacactaatt

SEQ ID NO: 1522 - RNA, 23 nt, Homo sapiens
  source 1..23: mol_type = genomic RNA
taatggtgtagaacactaattca

SEQ ID NO: 1523 - RNA, 23 nt, Homo sapiens
  source 1..23: mol_type = genomic RNA
aatggtgtagaacactaattcat

SEQ ID NO: 1524 - RNA, 23 nt, Homo sapiens
  source 1..23: mol_type = genomic RNA
atggtgtagaacactaattcata

SEQ ID NO: 1525 - RNA, 23 nt, Homo sapiens
  source 1..23: mol_type = genomic RNA
tggtgtagaacactaattcataa

SEQ ID NO: 1526 - RNA, 23 nt, Homo sapiens
  source 1..23: mol_type = genomic RNA
ggtgtagaacactaattcataat

SEQ ID NO: 1527 - RNA, 23 nt, Homo sapiens
  source 1..23: mol_type = genomic RNA
gtgtagaacactaattcataatc

SEQ ID NO: 1528 - RNA, 23 nt, Homo sapiens
  source 1..23: mol_type = genomic RNA
tgtagaacactaattcataatca

SEQ ID NO: 1529 - RNA, 23 nt, Homo sapiens
  source 1..23: mol_type = genomic RNA
gtagaacactaattcataatcac

SEQ ID NO: 1530 - RNA, 23 nt, Homo sapiens
  source 1..23: mol_type = genomic RNA
tagaacactaattcataatcact

SEQ ID NO: 1531 - RNA, 23 nt, Homo sapiens
  source 1..23: mol_type = genomic RNA
agaacactaattcataatcactc

SEQ ID NO: 1532 - RNA, 23 nt, Homo sapiens
  source 1..23: mol_type = genomic RNA
aaatggtccaattagtttccttt

SEQ ID NO: 1533 - RNA, 23 nt, Homo sapiens
  source 1..23: mol_type = genomic RNA
tatttgggatatgtatgggtagg

SEQ ID NO: 1534 - RNA, 23 nt, Homo sapiens
  source 1..23: mol_type = genomic RNA
tatgtatgggtagggtaaatcag

SEQ ID NO: 1535 - RNA, 23 nt, Homo sapiens
  source 1..23: mol_type = genomic RNA
gtatgggtagggtaaatcagtaa

SEQ ID NO: 1536 - RNA, 23 nt, Homo sapiens
  source 1..23: mol_type = genomic RNA
gggtagggtaaatcagtaagagg

SEQ ID NO: 1537 - RNA, 23 nt, Homo sapiens
  source 1..23: mol_type = genomic RNA
gtagggtaaatcagtaagaggtg

SEQ ID NO: 1538 - RNA, 23 nt, Homo sapiens
  source 1..23: mol_type = genomic RNA
tagggtaaatcagtaagaggtgt

SEQ ID NO: 1539 - RNA, 23 nt, Homo sapiens
  source 1..23: mol_type = genomic RNA
gggtaaatcagtaagaggtgtta

SEQ ID NO: 1540 - RNA, 23 nt, Homo sapiens
  source 1..23: mol_type = genomic RNA
gtaaatcagtaagaggtgttatt

SEQ ID NO: 1541 - RNA, 23 nt, Homo sapiens
  source 1..23: mol_type = genomic RNA
taaatcagtaagaggtgttattt

SEQ ID NO: 1542 - RNA, 23 nt, Homo sapiens
  source 1..23: mol_type = genomic RNA
atcagtaagaggtgttatttgga

SEQ ID NO: 1543 - RNA, 23 nt, Homo sapiens
  source 1..23: mol_type = genomic RNA
agttggacatggccatggaacca

SEQ ID NO: 1544 - RNA, 23 nt, Homo sapiens
  source 1..23: mol_type = genomic RNA
cctggactctggaatccattctg

SEQ ID NO: 1545 - RNA, 23 nt, Homo sapiens
  source 1..23: mol_type = genomic RNA
ttctctgagtggtaaaggcaatc

SEQ ID NO: 1546 - RNA, 23 nt, Homo sapiens
  source 1..23: mol_type = genomic RNA
actcaagaacaagtagctgatat

SEQ ID NO: 1547 - RNA, 23 nt, Homo sapiens
  source 1..23: mol_type = genomic RNA
agtagctgatattgatggacagt

SEQ ID NO: 1548 - RNA, 23 nt, Homo sapiens
  source 1..23: mol_type = genomic RNA
gtagctgatattgatggacagta

SEQ ID NO: 1549 - RNA, 23 nt, Homo sapiens
  source 1..23: mol_type = genomic RNA
agctgatattgatggacagtatg

SEQ ID NO: 1550 - RNA, 23 nt, Homo sapiens
  source 1..23: mol_type = genomic RNA
attgatggacagtatgcaatgac

SEQ ID NO: 1551 - RNA, 23 nt, Homo sapiens
  source 1..23: mol_type = genomic RNA
cgagctcagagggtacgagctgc

SEQ ID NO: 1552 - RNA, 23 nt, Homo sapiens
  source 1..23: mol_type = genomic RNA
agctcagagggtacgagctgcta

SEQ ID NO: 1553 - RNA, 23 nt, Homo sapiens
  source 1..23: mol_type = genomic RNA
tcagagggtacgagctgctatgt

SEQ ID NO: 1554 - RNA, 23 nt, Homo sapiens
  source 1..23: mol_type = genomic RNA
ctgctatgttccctgagacatta

SEQ ID NO: 1555 - RNA, 23 nt, Homo sapiens
  source 1..23: mol_type = genomic RNA
ccagcgtttggctgaaccatcac

SEQ ID NO: 1556 - RNA, 23 nt, Homo sapiens
  source 1..23: mol_type = genomic RNA
gatgctgaaacatgcagttgtaa

SEQ ID NO: 1557 - RNA, 23 nt, Homo sapiens
  source 1..23: mol_type = genomic RNA
aacatgcagttgtaaacttgatt

SEQ ID NO: 1558 - RNA, 23 nt, Homo sapiens
  source 1..23: mol_type = genomic RNA
atgcagttgtaaacttgattaac

SEQ ID NO: 1559 - RNA, 23 nt, Homo sapiens
  source 1..23: mol_type = genomic RNA
cttgattaactatcaagatgatg

SEQ ID NO: 1560 - RNA, 23 nt, Homo sapiens
  source 1..23: mol_type = genomic RNA
tgcagaacttgccacacgtgcaa

SEQ ID NO: 1561 - RNA, 23 nt, Homo sapiens
  source 1..23: mol_type = genomic RNA
gccacacgtgcaatccctgaact

SEQ ID NO: 1562 - RNA, 23 nt, Homo sapiens
  source 1..23: mol_type = genomic RNA
acgtgcaatccctgaactgacaa

SEQ ID NO: 1563 - RNA, 23 nt, Homo sapiens
  source 1..23: mol_type = genomic RNA
acgaggaccaggtggtggttaat

SEQ ID NO: 1564 - RNA, 23 nt, Homo sapiens
  source 1..23: mol_type = genomic RNA
aggtggtggttaataaggctgca

SEQ ID NO: 1565 - RNA, 23 nt, Homo sapiens
  source 1..23: mol_type = genomic RNA
catgcagaatacaaatgatgtag

SEQ ID NO: 1566 - RNA, 23 nt, Homo sapiens
  source 1..23: mol_type = genomic RNA
gcagaatacaaatgatgtagaaa

SEQ ID NO: 1567 - RNA, 23 nt, Homo sapiens
  source 1..23: mol_type = genomic RNA
accttgcataacctttcccatca

SEQ ID NO: 1568 - RNA, 23 nt, Homo sapiens
  source 1..23: mol_type = genomic RNA
ccttgcataacctttcccatcat

SEQ ID NO: 1569 - RNA, 23 nt, Homo sapiens
  source 1..23: mol_type = genomic RNA
ggccatctttaagtctggaggca

SEQ ID NO: 1570 - RNA, 23 nt, Homo sapiens
  source 1..23: mol_type = genomic RNA
atgccattacaactctccacaac

SEQ ID NO: 1571 - RNA, 23 nt, Homo sapiens
  source 1..23: mol_type = genomic RNA
tggttgccttgctcaacaaaaca

SEQ ID NO: 1572 - RNA, 23 nt, Homo sapiens
  source 1..23: mol_type = genomic RNA
gtaaatataatgaggacctatac

SEQ ID NO: 1573 - RNA, 23 nt, Homo sapiens
  source 1..23: mol_type = genomic RNA
taaatataatgaggacctatact

SEQ ID NO: 1574 - RNA, 23 nt, Homo sapiens
  source 1..23: mol_type = genomic RNA
aagcagagtgctgaaggtgctat

SEQ ID NO: 1575 - RNA, 23 nt, Homo sapiens
  source 1..23: mol_type = genomic RNA
gcttctgggttcagatgatataa

SEQ ID NO: 1576 - RNA, 23 nt, Homo sapiens
  source 1..23: mol_type = genomic RNA
cagatgatataaatgtggtcacc

SEQ ID NO: 1577 - RNA, 23 nt, Homo sapiens
  source 1..23: mol_type = genomic RNA
ctggaattctttctaacctcact

SEQ ID NO: 1578 - RNA, 23 nt, Homo sapiens
  source 1..23: mol_type = genomic RNA
attctttctaacctcacttgcaa

SEQ ID NO: 1579 - RNA, 23 nt, Homo sapiens
  source 1..23: mol_type = genomic RNA
ctttctaacctcacttgcaataa

SEQ ID NO: 1580 - RNA, 23 nt, Homo sapiens
  source 1..23: mol_type = genomic RNA
tttctaacctcacttgcaataat

SEQ ID NO: 1581 - RNA, 23 nt, Homo sapiens
  source 1..23: mol_type = genomic RNA
ccaagtgggtggtatagaggctc

SEQ ID NO: 1582 - RNA, 23 nt, Homo sapiens
  source 1..23: mol_type = genomic RNA
agtgggtggtatagaggctcttg

SEQ ID NO: 1583 - RNA, 23 nt, Homo sapiens
  source 1..23: mol_type = genomic RNA
tgagcctgccatctgtgctcttc

SEQ ID NO: 1584 - RNA, 23 nt, Homo sapiens
  source 1..23: mol_type = genomic RNA
gagcctgccatctgtgctcttcg

SEQ ID NO: 1585 - RNA, 23 nt, Homo sapiens
  source 1..23: mol_type = genomic RNA
gccatctgtgctcttcgtcatct

SEQ ID NO: 1586 - RNA, 23 nt, Homo sapiens
  source 1..23: mol_type = genomic RNA
gtgctcttcgtcatctgaccagc

SEQ ID NO: 1587 - RNA, 23 nt, Homo sapiens
  source 1..23: mol_type = genomic RNA
gaatgcagttcgccttcactatg

SEQ ID NO: 1588 - RNA, 23 nt, Homo sapiens
  source 1..23: mol_type = genomic RNA
tgtggttaagctcttacacccac

SEQ ID NO: 1589 - RNA, 23 nt, Homo sapiens
  source 1..23: mol_type = genomic RNA
actgttggattgattcgaaatct

SEQ ID NO: 1590 - RNA, 23 nt, Homo sapiens
  source 1..23: mol_type = genomic RNA
tgcgtgagcagggtgccattcca

SEQ ID NO: 1591 - RNA, 23 nt, Homo sapiens
  source 1..23: mol_type = genomic RNA
gttcagttgcttgttcgtgcaca

SEQ ID NO: 1592 - RNA, 23 nt, Homo sapiens
  source 1..23: mol_type = genomic RNA
tcagttgcttgttcgtgcacatc

SEQ ID NO: 1593 - RNA, 23 nt, Homo sapiens
  source 1..23: mol_type = genomic RNA
atcagaggactaaataccattcc

SEQ ID NO: 1594 - RNA, 23 nt, Homo sapiens
  source 1..23: mol_type = genomic RNA
aggactaaataccattccattgt

SEQ ID NO: 1595 - RNA, 23 nt, Homo sapiens
  source 1..23: mol_type = genomic RNA
ccattccattgtttgtgcagctg

SEQ ID NO: 1596 - RNA, 23 nt, Homo sapiens
  source 1..23: mol_type = genomic RNA
cattccattgtttgtgcagctgc

SEQ ID NO: 1597 - RNA, 23 nt, Homo sapiens
  source 1..23: mol_type = genomic RNA
ttccattgtttgtgcagctgctt

SEQ ID NO: 1598 - RNA, 23 nt, Homo sapiens
  source 1..23: mol_type = genomic RNA
gagccacagctcctctgacagag

SEQ ID NO: 1599 - RNA, 23 nt, Homo sapiens
  source 1..23: mol_type = genomic RNA
acaagccacaagattacaagaaa

SEQ ID NO: 1600 - RNA, 23 nt, Homo sapiens
  source 1..23: mol_type = genomic RNA
agccacaagattacaagaaacgg

SEQ ID NO: 1601 - RNA, 23 nt, Homo sapiens
  source 1..23: mol_type = genomic RNA
agattacaagaaacggctttcag

SEQ ID NO: 1602 - RNA, 23 nt, Homo sapiens
  source 1..23: mol_type = genomic RNA
acggctttcagttgagctgacca

SEQ ID NO: 1603 - RNA, 23 nt, Homo sapiens
  source 1..23: mol_type = genomic RNA
gttgagctgaccagctctctctt

SEQ ID NO: 1604 - RNA, 23 nt, Homo sapiens
  source 1..23: mol_type = genomic RNA
cagagccaatggcttggaatgag

SEQ ID NO: 1605 - RNA, 23 nt, Homo sapiens
  source 1..23: mol_type = genomic RNA
tgctgatcttggacttgatattg

SEQ ID NO: 1606 - RNA, 23 nt, Homo sapiens
  source 1..23: mol_type = genomic RNA
cctggtttgatactgacctgtaa

SEQ ID NO: 1607 - RNA, 23 nt, Homo sapiens
  source 1..23: mol_type = genomic RNA
ggtttgatactgacctgtaaatc

SEQ ID NO: 1608 - RNA, 23 nt, Homo sapiens
  source 1..23: mol_type = genomic RNA
taggctatttgtaaatctgccac

SEQ ID NO: 1609 - RNA, 23 nt, Homo sapiens
  source 1..23: mol_type = genomic RNA
gatttctggttgttatgtgatca

SEQ ID NO: 1610 - RNA, 23 nt, Homo sapiens
  source 1..23: mol_type = genomic RNA
cttaatactcaaatgagtaacat

SEQ ID NO: 1611 - RNA, 23 nt, Homo sapiens
  source 1..23: mol_type = genomic RNA
ctcagaaagtgcctgacacacta

SEQ ID NO: 1612 - RNA, 23 nt, Homo sapiens
  source 1..23: mol_type = genomic RNA
cagaaagtgcctgacacactaac

SEQ ID NO: 1613 - RNA, 23 nt, Homo sapiens
  source 1..23: mol_type = genomic RNA
gtgcctgacacactaaccaagct

SEQ ID NO: 1614 - RNA, 23 nt, Homo sapiens
  source 1..23: mol_type = genomic RNA
tatgggaacaattgaagtaaact

SEQ ID NO: 1615 - RNA, 23 nt, Homo sapiens
  source 1..23: mol_type = genomic RNA
gaatggatcacaagatggaattt

SEQ ID NO: 1616 - RNA, 23 nt, Homo sapiens
  source 1..23: mol_type = genomic RNA
aatttatcaaaccctagccttgc

SEQ ID NO: 1617 - RNA, 23 nt, Homo sapiens
  source 1..23: mol_type = genomic RNA
aatatctgtaatggtactgactt

SEQ ID NO: 1618 - RNA, 23 nt, Homo sapiens
  source 1..23: mol_type = genomic RNA
ctttgcttgctttgaagtagctc

SEQ ID NO: 1619 - RNA, 23 nt, Homo sapiens
  source 1..23: mol_type = genomic RNA
gtagtgttaagttatagtgaata

SEQ ID NO: 1620 - RNA, 23 nt, Homo sapiens
  source 1..23: mol_type = genomic RNA
agtgttaagttatagtgaatact

SEQ ID NO: 1621 - RNA, 23 nt, Homo sapiens
  source 1..23: mol_type = genomic RNA
gagtaatggtgtagaacactaat

SEQ ID NO: 1622 - RNA, 23 nt, Homo sapiens
  source 1..23: mol_type = genomic RNA
gtaatggtgtagaacactaattc

SEQ ID NO: 1623 - RNA, 23 nt, Homo sapiens
  source 1..23: mol_type = genomic RNA
cactaattcataatcactctaat

SEQ ID NO: 1624 - RNA, 23 nt, Homo sapiens
  source 1..23: mol_type = genomic RNA
ggtaaatcagtaagaggtgttat

SEQ ID NO: 1625 - RNA, 21 nt, synthetic construct
  source 1..21: mol_type = other RNA
actctggaatccattctggta

SEQ ID NO: 1626 - RNA, 21 nt, synthetic construct
  source 1..21: mol_type = other RNA
ctctggaatccattctggtga

SEQ ID NO: 1627 - RNA, 21 nt, synthetic construct
  source 1..21: mol_type = other RNA
tgctcatcccactaatgtcca

SEQ ID NO: 1628 - RNA, 21 nt, synthetic construct
  source 1..21: mol_type = other RNA
ctcatcccactaatgtccaga

SEQ ID NO: 1629 - RNA, 21 nt, synthetic construct
  source 1..21: mol_type = other RNA
agaaggagctaaaatggcaga

SEQ ID NO: 1630 - RNA, 21 nt, synthetic construct
  source 1..21: mol_type = other RNA
ggagctaaaatggcagtgcga

SEQ ID NO: 1631 - RNA, 21 nt, synthetic construct
  source 1..21: mol_type = other RNA
tactggccatctttaagtcta

SEQ ID NO: 1632 - RNA, 21 nt, synthetic construct
  source 1..21: mol_type = other RNA
gtgctcttcgtcatctgacca

SEQ ID NO: 1633 - RNA, 21 nt, synthetic construct
  source 1..21: mol_type = other RNA
gtcctctgtgaacttgctcaa

SEQ ID NO: 1634 - RNA, 21 nt, synthetic construct
  source 1..21: mol_type = other RNA
tcctctgtgaacttgctcaga

SEQ ID NO: 1635 - RNA, 21 nt, synthetic construct
  source 1..21: mol_type = other RNA
atcgttcttttcactctggta

SEQ ID NO: 1636 - RNA, 21 nt, synthetic construct
  source 1..21: mol_type = other RNA
tcgttcttttcactctggtga

SEQ ID NO: 1637 - RNA, 21 nt, synthetic construct
  source 1..21: mol_type = other RNA
tggtgctgactatccagttga

SEQ ID NO: 1638 - RNA, 21 nt, synthetic construct
  source 1..21: mol_type = other RNA
gctgactatccagttgatgga

SEQ ID NO: 1639 - RNA, 21 nt, synthetic construct
  source 1..21: mol_type = other RNA
ctgactatccagttgatggga

SEQ ID NO: 1640 - RNA, 21 nt, synthetic construct
  source 1..21: mol_type = other RNA
gactatccagttgatgggcta

SEQ ID NO: 1641 - RNA, 21 nt, synthetic construct
  source 1..21: mol_type = other RNA
attggcctgtagagttgctga

SEQ ID NO: 1642 - RNA, 21 nt, synthetic construct
  source 1..21: mol_type = other RNA
ggctggtatctcagaaagtga

SEQ ID NO: 1643 - RNA, 21 nt, synthetic construct
  source 1..21: mol_type = other RNA
gctggtatctcagaaagtgca

SEQ ID NO: 1644 - RNA, 21 nt, synthetic construct
  source 1..21: mol_type = other RNA
tggtatctcagaaagtgccta

SEQ ID NO: 1645 - RNA, 21 nt, synthetic construct
  source 1..21: mol_type = other RNA
aaccaagctgagtttcctata

SEQ ID NO: 1646 - RNA, 21 nt, synthetic construct
  source 1..21: mol_type = other RNA
ccaagctgagtttcctatgga

SEQ ID NO: 1647 - RNA, 21 nt, synthetic construct
  source 1..21: mol_type = other RNA
caagctgagtttcctatggga

SEQ ID NO: 1648 - RNA, 21 nt, synthetic construct
  source 1..21: mol_type = other RNA
aagctgagtttcctatgggaa

SEQ ID NO: 1649 - RNA, 21 nt, synthetic construct
  source 1..21: mol_type = other RNA
ttgttctggtcctttttggta

SEQ ID NO: 1650 - RNA, 21 nt, synthetic construct
  source 1..21: mol_type = other RNA
tgttctggtcctttttggtca

SEQ ID NO: 1651 - RNA, 21 nt, synthetic construct
  source 1..21: mol_type = other RNA
gttctggtcctttttggtcga

SEQ ID NO: 1652 - RNA, 21 nt, synthetic construct
  source 1..21: mol_type = other RNA
ttctggtcctttttggtcgaa

SEQ ID NO: 1653 - RNA, 21 nt, synthetic construct
  source 1..21: mol_type = other RNA
tctggtcctttttggtcgaga

SEQ ID NO: 1654 - RNA, 21 nt, synthetic construct
  source 1..21: mol_type = other RNA
ctggtcctttttggtcgagga

SEQ ID NO: 1655 - RNA, 21 nt, synthetic construct
  source 1..21: mol_type = other RNA
gaggagtaacaatacaaatga

SEQ ID NO: 1656 - RNA, 21 nt, synthetic construct
  source 1..21: mol_type = other RNA
tgcttaaaataagcaggtgga

SEQ ID NO: 1657 - RNA, 21 nt, synthetic construct
  source 1..21: mol_type = other RNA
taagcaggtggatctatttca

SEQ ID NO: 1658 - RNA, 21 nt, synthetic construct
  source 1..21: mol_type = other RNA
agcaggtggatctatttcata

SEQ ID NO: 1659 - RNA, 21 nt, synthetic construct
  source 1..21: mol_type = other RNA
gcaggtggatctatttcatga

SEQ ID NO: 1660 - RNA, 21 nt, synthetic construct
  source 1..21: mol_type = other RNA
ggtggatctatttcatgttta

SEQ ID NO: 1661 - RNA, 21 nt, synthetic construct
  source 1..21: mol_type = other RNA
gtggatctatttcatgtttta

SEQ ID NO: 1662 - RNA, 21 nt, synthetic construct
  source 1..21: mol_type = other RNA
ggatctatttcatgtttttga

SEQ ID NO: 1663 - RNA, 21 nt, synthetic construct
  source 1..21: mol_type = other RNA
gggtagggtaaatcagtaaga

SEQ ID NO: 1664 - RNA, 21 nt, synthetic construct
  source 1..21: mol_type = other RNA
tagggtaaatcagtaagagga

SEQ ID NO: 1665 - RNA, 21 nt, synthetic construct
  source 1..21: mol_type = other RNA
ggtaaatcagtaagaggtgta

SEQ ID NO: 1666 - RNA, 21 nt, synthetic construct
  source 1..21: mol_type = other RNA
ttaccagttgccttttatcca

SEQ ID NO: 1667 - RNA, 21 nt, synthetic construct
  source 1..21: mol_type = other RNA
taccagttgccttttatccca

SEQ ID NO: 1668 - RNA, 21 nt, synthetic construct
  source 1..21: mol_type = other RNA
tatcccaaagttgttgtaaca

SEQ ID NO: 1669 - RNA, 21 nt, synthetic construct
  source 1..21: mol_type = other RNA
cccaaagttgttgtaacctga

SEQ ID NO: 1670 - RNA, 23 nt, synthetic construct
  source 1..23: mol_type = other RNA
taccagaatggattccagagtcc

SEQ ID NO: 1671 - RNA, 23 nt, synthetic construct
  source 1..23: mol_type = other RNA
tcaccagaatggattccagagtc

SEQ ID NO: 1672 - RNA, 23 nt, synthetic construct
  source 1..23: mol_type = other RNA
tggacattagtgggatgagcagc

SEQ ID NO: 1673 - RNA, 23 nt, synthetic construct
  source 1..23: mol_type = other RNA
tctggacattagtgggatgagca

SEQ ID NO: 1674 - RNA, 23 nt, synthetic construct
  source 1..23: mol_type = other RNA
tatcatttgtattctgcatggta

SEQ ID NO: 1675 - RNA, 23 nt, synthetic construct
  source 1..23: mol_type = other RNA
tcatcatttgtattctgcatggt

SEQ ID NO: 1676 - RNA, 23 nt, synthetic construct
  source 1..23: mol_type = other RNA
tctgccattttagctccttcttg

SEQ ID NO: 1677 - RNA, 23 nt, synthetic construct
  source 1..23: mol_type = other RNA
tcgcactgccattttagctcctt

SEQ ID NO: 1678 - RNA, 23 nt, synthetic construct
  source 1..23: mol_type = other RNA
tagacttaaagatggccagtaag

SEQ ID NO: 1679 - RNA, 23 nt, synthetic construct
  source 1..23: mol_type = other RNA
tcagacttaaagatggccagtaa

SEQ ID NO: 1680 - RNA, 23 nt, synthetic construct
  source 1..23: mol_type = other RNA
taattattgcaagtgaggttaga

SEQ ID NO: 1681 - RNA, 23 nt, synthetic construct
  source 1..23: mol_type = other RNA
ttaattattgcaagtgaggttag

SEQ ID NO: 1682 - RNA, 23 nt, synthetic construct
  source 1..23: mol_type = other RNA
ttgacgaagagcacagatggcag

SEQ ID NO: 1683 - RNA, 23 nt, synthetic construct
  source 1..23: mol_type = other RNA
tagatgacgaagagcacagatgg

SEQ ID NO: 1684 - RNA, 23 nt, synthetic construct
  source 1..23: mol_type = other RNA
ttcagatgacgaagagcacagat

SEQ ID NO: 1685 - RNA, 23 nt, synthetic construct
  source 1..23: mol_type = other RNA
tggtcagatgacgaagagcacag

SEQ ID NO: 1686 - RNA, 23 nt, synthetic construct
  source 1..23: mol_type = other RNA
ttttcgaatcaatccaacagtag

SEQ ID NO: 1687 - RNA, 23 nt, synthetic construct
  source 1..23: mol_type = other RNA
tgcacaaacaatggaatggtatt

SEQ ID NO: 1688 - RNA, 23 nt, synthetic construct
  source 1..23: mol_type = other RNA
ttgagcaagttcacagaggaccc

SEQ ID NO: 1689 - RNA, 23 nt, synthetic construct
  source 1..23: mol_type = other RNA
tctgagcaagttcacagaggacc

SEQ ID NO: 1690 - RNA, 23 nt, synthetic construct
  source 1..23: mol_type = other RNA
taccagagtgaaaagaacgatag

SEQ ID NO: 1691 - RNA, 23 nt, synthetic construct
  source 1..23: mol_type = other RNA
tcaccagagtgaaaagaacgata

SEQ ID NO: 1692 - RNA, 23 nt, synthetic construct
  source 1..23: mol_type = other RNA
tcaactggatagtcagcaccagg

SEQ ID NO: 1693 - RNA, 23 nt, synthetic construct
  source 1..23: mol_type = other RNA
tccatcaactggatagtcagcac

SEQ ID NO: 1694 - RNA, 23 nt, synthetic construct
  source 1..23: mol_type = other RNA
tcccatcaactggatagtcagca

SEQ ID NO: 1695 - RNA, 23 nt, synthetic construct
  source 1..23: mol_type = other RNA
tagcccatcaactggatagtcag

SEQ ID NO: 1696 - RNA, 23 nt, synthetic construct
  source 1..23: mol_type = other RNA
tcagcaactctacaggccaatca

SEQ ID NO: 1697 - RNA, 23 nt, synthetic construct
  source 1..23: mol_type = other RNA
tcactttctgagataccagccca

SEQ ID NO: 1698 - RNA, 23 nt, synthetic construct
  source 1..23: mol_type = other RNA
tgcactttctgagataccagccc

SEQ ID NO: 1699 - RNA, 23 nt, synthetic construct
  source 1..23: mol_type = other RNA
taggcactttctgagataccagc

SEQ ID NO: 1700 - RNA, 23 nt, synthetic construct
  source 1..23: mol_type = other RNA
tcagcttggttagtgtgtcaggc

SEQ ID NO: 1701 - RNA, 23 nt, synthetic construct
  source 1..23: mol_type = other RNA
tataggaaactcagcttggttag

SEQ ID NO: 1702 - RNA, 23 nt, synthetic construct
  source 1..23: mol_type = other RNA
tccataggaaactcagcttggtt

SEQ ID NO: 1703 - RNA, 23 nt, synthetic construct
  source 1..23: mol_type = other RNA
tcccataggaaactcagcttggt

SEQ ID NO: 1704 - RNA, 23 nt, synthetic construct
  source 1..23: mol_type = other RNA
ttcccataggaaactcagcttgg

SEQ ID NO: 1705 - RNA, 23 nt, synthetic construct
  source 1..23: mol_type = other RNA
taccaaaaaggaccagaacaaaa

SEQ ID NO: 1706 - RNA, 23 nt, synthetic construct
  source 1..23: mol_type = other RNA
tgaccaaaaaggaccagaacaaa

SEQ ID NO: 1707 - RNA, 23 nt, synthetic construct
  source 1..23: mol_type = other RNA
tcgaccaaaaaggaccagaacaa

SEQ ID NO: 1708 - RNA, 23 nt, synthetic construct
  source 1..23: mol_type = other RNA
ttcgaccaaaaaggaccagaaca

SEQ ID NO: 1709 - RNA, 23 nt, synthetic construct
  source 1..23: mol_type = other RNA
tctcgaccaaaaaggaccagaac

SEQ ID NO: 1710 - RNA, 23 nt, synthetic construct
  source 1..23: mol_type = other RNA
tcctcgaccaaaaaggaccagaa

SEQ ID NO: 1711 - RNA, 23 nt, synthetic construct
  source 1..23: mol_type = other RNA
tcatttgtattgttactcctcga

SEQ ID NO: 1712 - RNA, 23 nt, synthetic construct
  source 1..23: mol_type = other RNA
tgaattagtgttctacaccatta

SEQ ID NO: 1713 - RNA, 23 nt, synthetic construct
  source 1..23: mol_type = other RNA
tatgaattagtgttctacaccat

SEQ ID NO: 1714 - RNA, 23 nt, synthetic construct
  source 1..23: mol_type = other RNA
tgattatgaattagtgttctaca

SEQ ID NO: 1715 - RNA, 23 nt, synthetic construct
  source 1..23: mol_type = other RNA
tgtgattatgaattagtgttcta

SEQ ID NO: 1716 - RNA, 23 nt, synthetic construct
  source 1..23: mol_type = other RNA
tccacctgcttattttaagcata

SEQ ID NO: 1717 - RNA, 23 nt, synthetic construct
  source 1..23: mol_type = other RNA
tgaaatagatccacctgcttatt

SEQ ID NO: 1718 - RNA, 23 nt, synthetic construct
  source 1..23: mol_type = other RNA
tatgaaatagatccacctgctta

SEQ ID NO: 1719 - RNA, 23 nt, synthetic construct
  source 1..23: mol_type = other RNA
tcatgaaatagatccacctgctt

SEQ ID NO: 1720 - RNA, 23 nt, synthetic construct
  source 1..23: mol_type = other RNA
taaacatgaaatagatccacctg

SEQ ID NO: 1721 - RNA, 23 nt, synthetic construct
  source 1..23: mol_type = other RNA
taaaacatgaaatagatccacct

SEQ ID NO: 1722 - RNA, 23 nt, synthetic construct
  source 1..23: mol_type = other RNA
tcaaaaacatgaaatagatccac

SEQ ID NO: 1723 - RNA, 23 nt, synthetic construct
  source 1..23: mol_type = other RNA
tcttactgatttaccctacccat

SEQ ID NO: 1724 - RNA, 23 nt, synthetic construct
  source 1..23: mol_type = other RNA
tctcttactgatttaccctaccc

SEQ ID NO: 1725 - RNA, 23 nt, synthetic construct
  source 1..23: mol_type = other RNA
tcctcttactgatttaccctacc

SEQ ID NO: 1726 - RNA, 23 nt, synthetic construct
  source 1..23: mol_type = other RNA
tacctcttactgatttaccctac

SEQ ID NO: 1727 - RNA, 23 nt, synthetic construct
  source 1..23: mol_type = other RNA
tacacctcttactgatttaccct

SEQ ID NO: 1728 - RNA, 23 nt, synthetic construct
  source 1..23: mol_type = other RNA
tggataaaaggcaactggtaaac

SEQ ID NO: 1729 - RNA, 23 nt, synthetic construct
  source 1..23: mol_type = other RNA
tgggataaaaggcaactggtaaa

SEQ ID NO: 1730 - RNA, 23 nt, synthetic construct
  source 1..23: mol_type = other RNA
tgttacaacaactttgggataaa

SEQ ID NO: 1731 - RNA, 23 nt, synthetic construct
  source 1..23: mol_type = other RNA
tcaggttacaacaactttgggat

SEQ ID NO: 1732 - RNA, 23 nt, synthetic construct
  source 1..23: mol_type = other RNA
tttcgaatcaatccaacagtagc

SEQ ID NO: 1733 - RNA, 21 nt, synthetic construct
  source 1..21: mol_type = other RNA
  modified_base 1: mod_base = OTHER; note = 2'-O-methyladenosine-3'-phosphorothioate
  modified_base 2: mod_base = OTHER; note = 2'-O-methylcytidine-3'-phosphorothioate
  modified_base 3: mod_base = OTHER; note = 2'-O-methyluridine-3'-phosphate
  modified_base 4: mod_base = OTHER; note = 2'-O-methylcytidine-3'-phosphate
  modified_base 5: mod_base = OTHER; note = 2'-O-methyluridine-3'-phosphate
  modified_base 6: mod_base = OTHER; note = 2'-O-methylguanosine-3'-phosphate
  modified_base 7: mod_base = OTHER; note = 2'-fluoroguanosine-3'-phosphate
  modified_base 8: mod_base = OTHER; note = 2'-O-methyladenosine-3'-phosphate
  modified_base 9: mod_base = OTHER; note = 2'-fluoroadenosine-3'-phosphate
  modified_base 10: mod_base = OTHER; note = 2'-fluorouridine-3'-phosphate
  modified_base 11: mod_base = OTHER; note = 2'-fluorocytidine-3'-phosphate
  modified_base 12: mod_base = OTHER; note = 2'-O-methylcytidine-3'-phosphate
  modified_base 13: mod_base = OTHER; note = 2'-O-methyladenosine-3'-phosphate
  modified_base 14: mod_base = OTHER; note = 2'-O-methyluridine-3'-phosphate
  modified_base 15: mod_base = OTHER; note = 2'-O-methyluridine-3'-phosphate
  modified_base 16: mod_base = OTHER; note = 2'-O-methylcytidine-3'-phosphate
  modified_base 17: mod_base = OTHER; note = 2'-O-methyluridine-3'-phosphate
  modified_base 18: mod_base = OTHER; note = 2'-O-methylguanosine-3'-phosphate
  modified_base 19: mod_base = OTHER; note = 2'-O-methylguanosine-3'-phosphate
  modified_base 20: mod_base = OTHER; note = 2'-O-methyluridine-3'-phosphate
  modified_base 21: mod_base = OTHER; note 2'-O-methyladenosine-3'-phosphate-N-[tris(GalNAc-alkyl)-ami dodecanoyl)]-4-hydroxyprolinol
actctggaatccattctggta

SEQ ID NO: 1734 - RNA, 21 nt, synthetic construct
  source 1..21: mol_type = other RNA
  modified_base 1: mod_base = OTHER; note = 2'-O-methylcytidine-3'-phosphorothioate
  modified_base 2: mod_base = OTHER; note = 2'-O-methyluridine-3'-phosphorothioate
  modified_base 3: mod_base = OTHER; note = 2'-O-methylcytidine-3'-phosphate
  modified_base 4: mod_base = OTHER; note = 2'-O-methyluridine-3'-phosphate
  modified_base 5: mod_base = OTHER; note = 2'-O-methylguanosine-3'-phosphate
  modified_base 6: mod_base = OTHER; note = 2'-O-methylguanosine-3'-phosphate
  modified_base 7: mod_base = OTHER; note = 2'-fluoroadenosine-3'-phosphate
  modified_base 8: mod_base = OTHER; note = 2'-O-methyladenosine-3'-phosphate
  modified_base 9: mod_base = OTHER; note = 2'-fluorouridine-3'-phosphate
  modified_base 10: mod_base = OTHER; note = 2'-fluorocytidine-3'-phosphate
  modified_base 11: mod_base = OTHER; note = 2'-fluorocytidine-3'-phosphate
  modified_base 12: mod_base = OTHER; note = 2'-O-methyladenosine-3'-phosphate
  modified_base 13: mod_base = OTHER; note = 2'-O-methyluridine-3'-phosphate
  modified_base 14: mod_base = OTHER; note = 2'-O-methyluridine-3'-phosphate
  modified_base 15: mod_base = OTHER; note = 2'-O-methylcytidine-3'-phosphate
  modified_base 16: mod_base = OTHER; note = 2'-O-methyluridine-3'-phosphate
  modified_base 17: mod_base = OTHER; note = 2'-O-methylguanosine-3'-phosphate
  modified_base 18: mod_base = OTHER; note = 2'-O-methylguanosine-3'-phosphate
  modified_base 19: mod_base = OTHER; note = 2'-O-methyluridine-3'-phosphate
  modified_base 20: mod_base = OTHER; note = 2'-O-methylguanosine-3'-phosphate
  modified_base 21: mod_base = OTHER; note 2'-O-methyladenosine-3'-phosphate-N-[tris(GalNAc-alkyl)-ami dodecanoyl)]-4-hydroxyprolinol
ctctggaatccattctggtga

SEQ ID NO: 1735 - RNA, 21 nt, synthetic construct
  source 1..21: mol_type = other RNA
  modified_base 1: mod_base = OTHER; note = 2'-O-methyluridine-3'-phosphorothioate
  modified_base 2: mod_base = OTHER; note = 2'-O-methylguanosine-3'-phosphorothioate
  modified_base 3: mod_base = OTHER; note = 2'-O-methylcytidine-3'-phosphate
  modified_base 4: mod_base = OTHER; note = 2'-O-methyluridine-3'-phosphate
  modified_base 5: mod_base = OTHER; note = 2'-O-methylcytidine-3'-phosphate
  modified_base 6: mod_base = OTHER; note = 2'-O-methyladenosine-3'-phosphate
  modified_base 7: mod_base = OTHER; note = 2'-fluorouridine-3'-phosphate
  modified_base 8: mod_base = OTHER; note = 2'-O-methylcytidine-3'-phosphate
  modified_base 9: mod_base = OTHER; note = 2'-fluorocytidine-3'-phosphate
  modified_base 10: mod_base = OTHER; note = 2'-fluorocytidine-3'-phosphate
  modified_base 11: mod_base = OTHER; note = 2'-fluoroadenosine-3'-phosphate
  modified_base 12: mod_base = OTHER; note = 2'-O-methylcytidine-3'-phosphate
  modified_base 13: mod_base = OTHER; note = 2'-O-methyluridine-3'-phosphate
  modified_base 14: mod_base = OTHER; note = 2'-O-methyladenosine-3'-phosphate
  modified_base 15: mod_base = OTHER; note = 2'-O-methyladenosine-3'-phosphate
  modified_base 16: mod_base = OTHER; note = 2'-O-methyluridine-3'-phosphate
  modified_base 17: mod_base = OTHER; note = 2'-O-methylguanosine-3'-phosphate
  modified_base 18: mod_base = OTHER; note = 2'-O-methyluridine-3'-phosphate
  modified_base 19: mod_base = OTHER; note = 2'-O-methylcytidine-3'-phosphate
  modified_base 20: mod_base = OTHER; note = 2'-O-methylcytidine-3'-phosphate
  modified_base 21: mod_base = OTHER; note 2'-O-methyladenosine-3'-phosphate-N-[tris(GalNAc-alkyl)-ami dodecanoyl)]-4-hydroxyprolinol
tgctcatcccactaatgtcca

SEQ ID NO: 1736 - RNA, 21 nt, synthetic construct
  source 1..21: mol_type = other RNA
  modified_base 1: mod_base = OTHER; note = 2'-O-methylcytidine-3'-phosphorothioate
  modified_base 2: mod_base = OTHER; note = 2'-O-methyluridine-3'-phosphorothioate
  modified_base 3: mod_base = OTHER; note = 2'-O-methylcytidine-3'-phosphate
  modified_base 4: mod_base = OTHER; note = 2'-O-methyladenosine-3'-phosphate
  modified_base 5: mod_base = OTHER; note = 2'-O-methyluridine-3'-phosphate
  modified_base 6: mod_base = OTHER; note = 2'-O-methylcytidine-3'-phosphate
  modified_base 7: mod_base = OTHER; note = 2'-fluorocytidine-3'-phosphate
  modified_base 8: mod_base = OTHER; note = 2'-O-methylcytidine-3'-phosphate
  modified_base 9: mod_base = OTHER; note = 2'-fluoroadenosine-3'-phosphate
  modified_base 10: mod_base = OTHER; note = 2'-fluorocytidine-3'-phosphate
  modified_base 11: mod_base = OTHER; note = 2'-fluorouridine-3'-phosphate
  modified_base 12: mod_base = OTHER; note = 2'-O-methyladenosine-3'-phosphate
  modified_base 13: mod_base = OTHER; note = 2'-O-methyladenosine-3'-phosphate
  modified_base 14: mod_base = OTHER; note = 2'-O-methyluridine-3'-phosphate
  modified_base 15: mod_base = OTHER; note = 2'-O-methylguanosine-3'-phosphate
  modified_base 16: mod_base = OTHER; note = 2'-O-methyluridine-3'-phosphate
  modified_base 17: mod_base = OTHER; note = 2'-O-methylcytidine-3'-phosphate
  modified_base 18: mod_base = OTHER; note = 2'-O-methylcytidine-3'-phosphate
  modified_base 19: mod_base = OTHER; note = 2'-O-methyladenosine-3'-phosphate
  modified_base 20: mod_base = OTHER; note = 2'-O-methylguanosine-3'-phosphate
  modified_base 21: mod_base = OTHER; note 2'-O-methyladenosine-3'-phosphate-N-[tris(GalNAc-alkyl)-ami dodecanoyl)]-4-hydroxyprolinol
ctcatcccactaatgtccaga

SEQ ID NO: 1737 - RNA, 21 nt, synthetic construct
  source 1..21: mol_type = other RNA
  modified_base 1: mod_base = OTHER; note = 2'-O-methylcytidine-3'-phosphorothioate
  modified_base 2: mod_base = OTHER; note = 2'-O-methylcytidine-3'-phosphorothioate
  modified_base 3: mod_base = OTHER; note = 2'-O-methyladenosine-3'-phosphate
  modified_base 4: mod_base = OTHER; note = 2'-O-methyluridine-3'-phosphate
  modified_base 5: mod_base = OTHER; note = 2'-O-methylguanosine-3'-phosphate
  modified_base 6: mod_base = OTHER; note = 2'-O-methylcytidine-3'-phosphate
  modified_base 7: mod_base = OTHER; note = 2'-fluoroadenosine-3'-phosphate
  modified_base 8: mod_base = OTHER; note = 2'-O-methylguanosine-3'-phosphate
  modified_base 9: mod_base = OTHER; note = 2'-fluoroadenosine-3'-phosphate
  modified_base 10: mod_base = OTHER; note = 2'-fluoroadenosine-3'-phosphate
  modified_base 11: mod_base = OTHER; note = 2'-fluorouridine-3'-phosphate
  modified_base 12: mod_base = OTHER; note = 2'-O-methyladenosine-3'-phosphate
  modified_base 13: mod_base = OTHER; note = 2'-O-methylcytidine-3'-phosphate
  modified_base 14: mod_base = OTHER; note = 2'-O-methyladenosine-3'-phosphate
  modified_base 15: mod_base = OTHER; note = 2'-O-methyladenosine-3'-phosphate
  modified_base 16: mod_base = OTHER; note = 2'-O-methyladenosine-3'-phosphate
  modified_base 17: mod_base = OTHER; note = 2'-O-methyluridine-3'-phosphate
  modified_base 18: mod_base = OTHER; note = 2'-O-methylguanosine-3'-phosphate
  modified_base 19: mod_base = OTHER; note = 2'-O-methyladenosine-3'-phosphate
  modified_base 20: mod_base = OTHER; note = 2'-O-methyluridine-3'-phosphate
  modified_base 21: mod_base = OTHER; note 2'-O-methyladenosine-3'-phosphate-N-[tris(GalNAc-alkyl)-ami dodecanoyl)]-4-hydroxyprolinol
ccatgcagaatacaaatgata

SEQ ID NO: 1738 - RNA, 21 nt, synthetic construct
  source 1..21: mol_type = other RNA
  modified_base 1: mod_base = OTHER; note = 2'-O-methylcytidine-3'-phosphorothioate
  modified_base 2: mod_base = OTHER; note = 2'-O-methyladenosine-3'-phosphorothioate
  modified_base 3: mod_base = OTHER; note = 2'-O-methyluridine-3'-phosphate
  modified_base 4: mod_base = OTHER; note = 2'-O-methylguanosine-3'-phosphate
  modified_base 5: mod_base = OTHER; note = 2'-O-methylcytidine-3'-phosphate
  modified_base 6: mod_base = OTHER; note = 2'-O-methyladenosine-3'-phosphate
  modified_base 7: mod_base = OTHER; note = 2'-fluoroguanosine-3'-phosphate
  modified_base 8: mod_base = OTHER; note = 2'-O-methyladenosine-3'-phosphate
  modified_base 9: mod_base = OTHER; note = 2'-fluoroadenosine-3'-phosphate
  modified_base 10: mod_base = OTHER; note = 2'-fluorouridine-3'-phosphate
  modified_base 11: mod_base = OTHER; note = 2'-fluoroadenosine-3'-phosphate
  modified_base 12: mod_base = OTHER; note = 2'-O-methylcytidine-3'-phosphate
  modified_base 13: mod_base = OTHER; note = 2'-O-methyladenosine-3'-phosphate
  modified_base 14: mod_base = OTHER; note = 2'-O-methyladenosine-3'-phosphate
  modified_base 15: mod_base = OTHER; note = 2'-O-methyladenosine-3'-phosphate
  modified_base 16: mod_base = OTHER; note = 2'-O-methyluridine-3'-phosphate
  modified_base 17: mod_base = OTHER; note = 2'-O-methylguanosine-3'-phosphate
  modified_base 18: mod_base = OTHER; note = 2'-O-methyladenosine-3'-phosphate
  modified_base 19: mod_base = OTHER; note = 2'-O-methyluridine-3'-phosphate
  modified_base 20: mod_base = OTHER; note = 2'-O-methylguanosine-3'-phosphate
  modified_base 21: mod_base = OTHER; note 2'-O-methyladenosine-3'-phosphate-N-[tris(GalNAc-alkyl)-ami dodecanoyl)]-4-hydroxyprolinol
catgcagaatacaaatgatga

SEQ ID NO: 1739 - RNA, 21 nt, synthetic construct
  source 1..21: mol_type = other RNA
  modified_base 1: mod_base = OTHER; note = 2'-O-methyladenosine-3'-phosphorothioate
  modified_base 2: mod_base = OTHER; note = 2'-O-methylguanosine-3'-phosphorothioate
  modified_base 3: mod_base = OTHER; note = 2'-O-methyladenosine-3'-phosphate
  modified_base 4: mod_base = OTHER; note = 2'-O-methyladenosine-3'-phosphate
  modified_base 5: mod_base = OTHER; note = 2'-O-methylguanosine-3'-phosphate
  modified_base 6: mod_base = OTHER; note = 2'-O-methylguanosine-3'-phosphate
  modified_base 7: mod_base = OTHER; note = 2'-fluoroadenosine-3'-phosphate
  modified_base 8: mod_base = OTHER; note = 2'-O-methylguanosine-3'-phosphate
  modified_base 9: mod_base = OTHER; note = 2'-fluorocytidine-3'-phosphate
  modified_base 10: mod_base = OTHER; note = 2'-fluorouridine-3'-phosphate
  modified_base 11: mod_base = OTHER; note = 2'-fluoroadenosine-3'-phosphate
  modified_base 12: mod_base = OTHER; note = 2'-O-methyladenosine-3'-phosphate
  modified_base 13: mod_base = OTHER; note = 2'-O-methyladenosine-3'-phosphate
  modified_base 14: mod_base = OTHER; note = 2'-O-methyladenosine-3'-phosphate
  modified_base 15: mod_base = OTHER; note = 2'-O-methyluridine-3'-phosphate
  modified_base 16: mod_base = OTHER; note = 2'-O-methylguanosine-3'-phosphate
  modified_base 17: mod_base = OTHER; note = 2'-O-methylguanosine-3'-phosphate
  modified_base 18: mod_base = OTHER; note = 2'-O-methylcytidine-3'-phosphate
  modified_base 19: mod_base = OTHER; note = 2'-O-methyladenosine-3'-phosphate
  modified_base 20: mod_base = OTHER; note = 2'-O-methylguanosine-3'-phosphate
  modified_base 21: mod_base = OTHER; note 2'-O-methyladenosine-3'-phosphate-N-[tris(GalNAc-alkyl)-ami dodecanoyl)]-4-hydroxyprolinol
agaaggagctaaaatggcaga

SEQ ID NO: 1740 - RNA, 21 nt, synthetic construct
  source 1..21: mol_type = other RNA
  modified_base 1: mod_base = OTHER; note = 2'-O-methylguanosine-3'-phosphorothioate
  modified_base 2: mod_base = OTHER; note = 2'-O-methylguanosine-3'-phosphorothioate
  modified_base 3: mod_base = OTHER; note = 2'-O-methyladenosine-3'-phosphate
  modified_base 4: mod_base = OTHER; note = 2'-O-methylguanosine-3'-phosphate
  modified_base 5: mod_base = OTHER; note = 2'-O-methylcytidine-3'-phosphate
  modified_base 6: mod_base = OTHER; note = 2'-O-methyluridine-3'-phosphate
  modified_base 7: mod_base = OTHER; note = 2'-fluoroadenosine-3'-phosphate
  modified_base 8: mod_base = OTHER; note = 2'-O-methyladenosine-3'-phosphate
  modified_base 9: mod_base = OTHER; note = 2'-fluoroadenosine-3'-phosphate
  modified_base 10: mod_base = OTHER; note = 2'-fluoroadenosine-3'-phosphate
  modified_base 11: mod_base = OTHER; note = 2'-fluorouridine-3'-phosphate
  modified_base 12: mod_base = OTHER; note = 2'-O-methylguanosine-3'-phosphate
  modified_base 13: mod_base = OTHER; note = 2'-O-methylguanosine-3'-phosphate
  modified_base 14: mod_base = OTHER; note = 2'-O-methylcytidine-3'-phosphate
  modified_base 15: mod_base = OTHER; note = 2'-O-methyladenosine-3'-phosphate
  modified_base 16: mod_base = OTHER; note = 2'-O-methylguanosine-3'-phosphate
  modified_base 17: mod_base = OTHER; note = 2'-O-methyluridine-3'-phosphate
  modified_base 18: mod_base = OTHER; note = 2'-O-methylguanosine-3'-phosphate
  modified_base 19: mod_base = OTHER; note = 2'-O-methylcytidine-3'-phosphate
  modified_base 20: mod_base = OTHER; note = 2'-O-methylguanosine-3'-phosphate
  modified_base 21: mod_base = OTHER; note 2'-O-methyladenosine-3'-phosphate-N-[tris(GalNAc-alkyl)-ami dodecanoyl)]-4-hydroxyprolinol
ggagctaaaatggcagtgcga

SEQ ID NO: 1741 - RNA, 21 nt, synthetic construct
  source 1..21: mol_type = other RNA
  modified_base 1: mod_base = OTHER; note = 2'-O-methyluridine-3'-phosphorothioate
  modified_base 2: mod_base = OTHER; note = 2'-O-methyladenosine-3'-phosphorothioate
  modified_base 3: mod_base = OTHER; note = 2'-O-methylcytidine-3'-phosphate
  modified_base 4: mod_base = OTHER; note = 2'-O-methyluridine-3'-phosphate
  modified_base 5: mod_base = OTHER; note = 2'-O-methylguanosine-3'-phosphate
  modified_base 6: mod_base = OTHER; note = 2'-O-methylguanosine-3'-phosphate
  modified_base 7: mod_base = OTHER; note = 2'-fluorocytidine-3'-phosphate
  modified_base 8: mod_base = OTHER; note = 2'-O-methylcytidine-3'-phosphate
  modified_base 9: mod_base = OTHER; note = 2'-fluoroadenosine-3'-phosphate
  modified_base 10: mod_base = OTHER; note = 2'-fluorouridine-3'-phosphate
  modified_base 11: mod_base = OTHER; note = 2'-fluorocytidine-3'-phosphate
  modified_base 12: mod_base = OTHER; note = 2'-O-methyluridine-3'-phosphate
  modified_base 13: mod_base = OTHER; note = 2'-O-methyluridine-3'-phosphate
  modified_base 14: mod_base = OTHER; note = 2'-O-methyluridine-3'-phosphate
  modified_base 15: mod_base = OTHER; note = 2'-O-methyladenosine-3'-phosphate
  modified_base 16: mod_base = OTHER; note = 2'-O-methyladenosine-3'-phosphate
  modified_base 17: mod_base = OTHER; note = 2'-O-methylguanosine-3'-phosphate
  modified_base 18: mod_base = OTHER; note = 2'-O-methyluridine-3'-phosphate
  modified_base 19: mod_base = OTHER; note = 2'-O-methylcytidine-3'-phosphate
  modified_base 20: mod_base = OTHER; note = 2'-O-methyluridine-3'-phosphate
  modified_base 21: mod_base = OTHER; note 2'-O-methyladenosine-3'-phosphate-N-[tris(GalNAc-alkyl)-ami dodecanoyl)]-4-hydroxyprolinol
tactggccatctttaagtcta

SEQ ID NO: 1742 - RNA, 21 nt, synthetic construct
  source 1..21: mol_type = other RNA
  modified_base 1: mod_base = OTHER; note = 2'-O-methyladenosine-3'-phosphorothioate
  modified_base 2: mod_base = OTHER; note = 2'-O-methylcytidine-3'-phosphorothioate
  modified_base 3: mod_base = OTHER; note = 2'-O-methyluridine-3'-phosphate
  modified_base 4: mod_base = OTHER; note = 2'-O-methylguanosine-3'-phosphate
  modified_base 5: mod_base = OTHER; note = 2'-O-methylguanosine-3'-phosphate
  modified_base 6: mod_base = OTHER; note = 2'-O-methylcytidine-3'-phosphate
  modified_base 7: mod_base = OTHER; note = 2'-fluorocytidine-3'-phosphate
  modified_base 8: mod_base = OTHER; note = 2'-O-methyladenosine-3'-phosphate
  modified_base 9: mod_base = OTHER; note = 2'-fluorouridine-3'-phosphate
  modified_base 10: mod_base = OTHER; note = 2'-fluorocytidine-3'-phosphate
  modified_base 11: mod_base = OTHER; note = 2'-fluorouridine-3'-phosphate
  modified_base 12: mod_base = OTHER; note = 2'-O-methyluridine-3'-phosphate
  modified_base 13: mod_base = OTHER; note = 2'-O-methyluridine-3'-phosphate
  modified_base 14: mod_base = OTHER; note = 2'-O-methyladenosine-3'-phosphate
  modified_base 15: mod_base = OTHER; note = 2'-O-methyladenosine-3'-phosphate
  modified_base 16: mod_base = OTHER; note = 2'-O-methylguanosine-3'-phosphate
  modified_base 17: mod_base = OTHER; note = 2'-O-methyluridine-3'-phosphate
  modified_base 18: mod_base = OTHER; note = 2'-O-methylcytidine-3'-phosphate
  modified_base 19: mod_base = OTHER; note = 2'-O-methyluridine-3'-phosphate
  modified_base 20: mod_base = OTHER; note = 2'-O-methylguanosine-3'-phosphate
  modified_base 21: mod_base = OTHER; note 2'-O-methyladenosine-3'-phosphate-N-[tris(GalNAc-alkyl)-ami dodecanoyl)]-4-hydroxyprolinol
actggccatctttaagtctga

SEQ ID NO: 1743 - RNA, 21 nt, synthetic construct
  source 1..21: mol_type = other RNA
  modified_base 1: mod_base = OTHER; note = 2'-O-methylcytidine-3'-phosphorothioate
  modified_base 2: mod_base = OTHER; note = 2'-O-methyluridine-3'-phosphorothioate
  modified_base 3: mod_base = OTHER; note = 2'-O-methylguanosine-3'-phosphate
  modified_base 4: mod_base = OTHER; note = 2'-O-methylguanosine-3'-phosphate
  modified_base 5: mod_base = OTHER; note = 2'-O-methylcytidine-3'-phosphate
  modified_base 6: mod_base = OTHER; note = 2'-O-methylcytidine-3'-phosphate
  modified_base 7: mod_base = OTHER; note = 2'-fluoroadenosine-3'-phosphate
  modified_base 8: mod_base = OTHER; note = 2'-O-methyluridine-3'-phosphate
  modified_base 9: mod_base = OTHER; note = 2'-fluorocytidine-3'-phosphate
  modified_base 10: mod_base = OTHER; note = 2'-fluorouridine-3'-phosphate
  modified_base 11: mod_base = OTHER; note = 2'-fluorouridine-3'-phosphate
  modified_base 12: mod_base = OTHER; note = 2'-O-methyluridine-3'-phosphate
  modified_base 13: mod_base = OTHER; note = 2'-O-methyladenosine-3'-phosphate
  modified_base 14: mod_base = OTHER; note = 2'-O-methyladenosine-3'-phosphate
  modified_base 15: mod_base = OTHER; note = 2'-O-methylguanosine-3'-phosphate
  modified_base 16: mod_base = OTHER; note = 2'-O-methyluridine-3'-phosphate
  modified_base 17: mod_base = OTHER; note = 2'-O-methylcytidine-3'-phosphate
  modified_base 18: mod_base = OTHER; note = 2'-O-methyluridine-3'-phosphate
  modified_base 19: mod_base = OTHER; note = 2'-O-methylguanosine-3'-phosphate
  modified_base 20: mod_base = OTHER; note = 2'-O-methylguanosine-3'-phosphate
  modified_base 21: mod_base = OTHER; note 2'-O-methyladenosine-3'-phosphate-N-[tris(GalNAc-alkyl)-ami dodecanoyl)]-4-hydroxyprolinol
ctggccatctttaagtctgga

SEQ ID NO: 1744 - RNA, 21 nt, synthetic construct
  source 1..21: mol_type = other RNA
  modified_base 1: mod_base = OTHER; note = 2'-O-methyluridine-3'-phosphorothioate
  modified_base 2: mod_base = OTHER; note = 2'-O-methyladenosine-3'-phosphorothioate
  modified_base 3: mod_base = OTHER; note = 2'-O-methyladenosine-3'-phosphate
  modified_base 4: mod_base = OTHER; note = 2'-O-methylcytidine-3'-phosphate
  modified_base 5: mod_base = OTHER; note = 2'-O-methylcytidine-3'-phosphate
  modified_base 6: mod_base = OTHER; note = 2'-O-methyluridine-3'-phosphate
  modified_base 7: mod_base = OTHER; note = 2'-fluorocytidine-3'-phosphate
  modified_base 8: mod_base = OTHER; note = 2'-O-methyladenosine-3'-phosphate
  modified_base 9: mod_base = OTHER; note = 2'-fluorocytidine-3'-phosphate
  modified_base 10: mod_base = OTHER; note = 2'-fluorouridine-3'-phosphate
  modified_base 11: mod_base = OTHER; note = 2'-fluorouridine-3'-phosphate
  modified_base 12: mod_base = OTHER; note = 2'-O-methylguanosine-3'-phosphate
  modified_base 13: mod_base = OTHER; note = 2'-O-methylcytidine-3'-phosphate
  modified_base 14: mod_base = OTHER; note = 2'-O-methyladenosine-3'-phosphate
  modified_base 15: mod_base = OTHER; note = 2'-O-methyladenosine-3'-phosphate
  modified_base 16: mod_base = OTHER; note = 2'-O-methyluridine-3'-phosphate
  modified_base 17: mod_base = OTHER; note = 2'-O-methyladenosine-3'-phosphate
  modified_base 18: mod_base = OTHER; note = 2'-O-methyladenosine-3'-phosphate
  modified_base 19: mod_base = OTHER; note = 2'-O-methyluridine-3'-phosphate
  modified_base 20: mod_base = OTHER; note = 2'-O-methyluridine-3'-phosphate
  modified_base 21: mod_base = OTHER; note 2'-O-methyladenosine-3'-phosphate-N-[tris(GalNAc-alkyl)-ami dodecanoyl)]-4-hydroxyprolinol
taacctcacttgcaataatta

SEQ ID NO: 1745 - RNA, 21 nt, synthetic construct
  source 1..21: mol_type = other RNA
  modified_base 1: mod_base = OTHER; note = 2'-O-methyladenosine-3'-phosphorothioate
  modified_base 2: mod_base = OTHER; note = 2'-O-methyladenosine-3'-phosphorothioate
  modified_base 3: mod_base = OTHER; note = 2'-O-methylcytidine-3'-phosphate
  modified_base 4: mod_base = OTHER; note = 2'-O-methylcytidine-3'-phosphate
  modified_base 5: mod_base = OTHER; note = 2'-O-methyluridine-3'-phosphate
  modified_base 6: mod_base = OTHER; note = 2'-O-methylcytidine-3'-phosphate
  modified_base 7: mod_base = OTHER; note = 2'-fluoroadenosine-3'-phosphate
  modified_base 8: mod_base = OTHER; note = 2'-O-methylcytidine-3'-phosphate
  modified_base 9: mod_base = OTHER; note = 2'-fluorouridine-3'-phosphate
  modified_base 10: mod_base = OTHER; note = 2'-fluorouridine-3'-phosphate
  modified_base 11: mod_base = OTHER; note = 2'-fluoroguanosine-3'-phosphate
  modified_base 12: mod_base = OTHER; note = 2'-O-methylcytidine-3'-phosphate
  modified_base 13: mod_base = OTHER; note = 2'-O-methyladenosine-3'-phosphate
  modified_base 14: mod_base = OTHER; note = 2'-O-methyladenosine-3'-phosphate
  modified_base 15: mod_base = OTHER; note = 2'-O-methyluridine-3'-phosphate
  modified_base 16: mod_base = OTHER; note = 2'-O-methyladenosine-3'-phosphate
  modified_base 17: mod_base = OTHER; note = 2'-O-methyladenosine-3'-phosphate
  modified_base 18: mod_base = OTHER; note = 2'-O-methyluridine-3'-phosphate
  modified_base 19: mod_base = OTHER; note = 2'-O-methyluridine-3'-phosphate
  modified_base 20: mod_base = OTHER; note = 2'-O-methyladenosine-3'-phosphate
  modified_base 21: mod_base = OTHER; note 2'-O-methyladenosine-3'-phosphate-N-[tris(GalNAc-alkyl)-ami dodecanoyl)]-4-hydroxyprolinol
aacctcacttgcaataattaa

SEQ ID NO: 1746 - RNA, 21 nt, synthetic construct
  source 1..21: mol_type = other RNA
  modified_base 1: mod_base = OTHER; note = 2'-O-methylguanosine-3'-phosphorothioate
  modified_base 2: mod_base = OTHER; note = 2'-O-methylcytidine-3'-phosphorothioate
  modified_base 3: mod_base = OTHER; note = 2'-O-methylcytidine-3'-phosphate
  modified_base 4: mod_base = OTHER; note = 2'-O-methyladenosine-3'-phosphate
  modified_base 5: mod_base = OTHER; note = 2'-O-methyluridine-3'-phosphate
  modified_base 6: mod_base = OTHER; note = 2'-O-methylcytidine-3'-phosphate
  modified_base 7: mod_base = OTHER; note = 2'-fluorouridine-3'-phosphate
  modified_base 8: mod_base = OTHER; note = 2'-O-methylguanosine-3'-phosphate
  modified_base 9: mod_base = OTHER; note = 2'-fluorouridine-3'-phosphate
  modified_base 10: mod_base = OTHER; note = 2'-fluoroguanosine-3'-phosphate
  modified_base 11: mod_base = OTHER; note = 2'-fluorocytidine-3'-phosphate
  modified_base 12: mod_base = OTHER; note = 2'-O-methyluridine-3'-phosphate
  modified_base 13: mod_base = OTHER; note = 2'-O-methylcytidine-3'-phosphate
  modified_base 14: mod_base = OTHER; note = 2'-O-methyluridine-3'-phosphate
  modified_base 15: mod_base = OTHER; note = 2'-O-methyluridine-3'-phosphate
  modified_base 16: mod_base = OTHER; note = 2'-O-methylcytidine-3'-phosphate
  modified_base 17: mod_base = OTHER; note = 2'-O-methylguanosine-3'-phosphate
  modified_base 18: mod_base = OTHER; note = 2'-O-methyluridine-3'-phosphate
  modified_base 19: mod_base = OTHER; note = 2'-O-methylcytidine-3'-phosphate
  modified_base 20: mod_base = OTHER; note = 2'-O-methyladenosine-3'-phosphate
  modified_base 21: mod_base = OTHER; note 2'-O-methyladenosine-3'-phosphate-N-[tris(GalNAc-alkyl)-ami dodecanoyl)]-4-hydroxyprolinol
gccatctgtgctcttcgtcaa

SEQ ID NO: 1747 - RNA, 21 nt, synthetic construct
  source 1..21: mol_type = other RNA
  modified_base 1: mod_base = OTHER; note = 2'-O-methylcytidine-3'-phosphorothioate
  modified_base 2: mod_base = OTHER; note = 2'-O-methylcytidine-3'-phosphorothioate
  modified_base 3: mod_base = OTHER; note = 2'-O-methyladenosine-3'-phosphate
  modified_base 4: mod_base = OTHER; note = 2'-O-methyluridine-3'-phosphate
  modified_base 5: mod_base = OTHER; note = 2'-O-methylcytidine-3'-phosphate
  modified_base 6: mod_base = OTHER; note = 2'-O-methyluridine-3'-phosphate
  modified_base 7: mod_base = OTHER; note = 2'-fluoroguanosine-3'-phosphate
  modified_base 8: mod_base = OTHER; note = 2'-O-methyluridine-3'-phosphate
  modified_base 9: mod_base = OTHER; note = 2'-fluoroguanosine-3'-phosphate
  modified_base 10: mod_base = OTHER; note = 2'-fluorocytidine-3'-phosphate
  modified_base 11: mod_base = OTHER; note = 2'-fluorouridine-3'-phosphate
  modified_base 12: mod_base = OTHER; note = 2'-O-methylcytidine-3'-phosphate
  modified_base 13: mod_base = OTHER; note = 2'-O-methyluridine-3'-phosphate
  modified_base 14: mod_base = OTHER; note = 2'-O-methyluridine-3'-phosphate
  modified_base 15: mod_base = OTHER; note = 2'-O-methylcytidine-3'-phosphate
  modified_base 16: mod_base = OTHER; note = 2'-O-methylguanosine-3'-phosphate
  modified_base 17: mod_base = OTHER; note = 2'-O-methyluridine-3'-phosphate
  modified_base 18: mod_base = OTHER; note = 2'-O-methylcytidine-3'-phosphate
  modified_base 19: mod_base = OTHER; note = 2'-O-methyladenosine-3'-phosphate
  modified_base 20: mod_base = OTHER; note = 2'-O-methyluridine-3'-phosphate
  modified_base 21: mod_base = OTHER; note 2'-O-methyladenosine-3'-phosphate-N-[tris(GalNAc-alkyl)-ami dodecanoyl)]-4-hydroxyprolinol
ccatctgtgctcttcgtcata

SEQ ID NO: 1748 - RNA, 21 nt, synthetic construct
  source 1..21: mol_type = other RNA
  modified_base 1: mod_base = OTHER; note = 2'-O-methyladenosine-3'-phosphorothioate
  modified_base 2: mod_base = OTHER; note = 2'-O-methyluridine-3'-phosphorothioate
  modified_base 3: mod_base = OTHER; note = 2'-O-methylcytidine-3'-phosphate
  modified_base 4: mod_base = OTHER; note = 2'-O-methyluridine-3'-phosphate
  modified_base 5: mod_base = OTHER; note = 2'-O-methylguanosine-3'-phosphate
  modified_base 6: mod_base = OTHER; note = 2'-O-methyluridine-3'-phosphate
  modified_base 7: mod_base = OTHER; note = 2'-fluoroguanosine-3'-phosphate
  modified_base 8: mod_base = OTHER; note = 2'-O-methylcytidine-3'-phosphate
  modified_base 9: mod_base = OTHER; note = 2'-fluorouridine-3'-phosphate
  modified_base 10: mod_base = OTHER; note = 2'-fluorocytidine-3'-phosphate
  modified_base 11: mod_base = OTHER; note = 2'-fluorouridine-3'-phosphate
  modified_base 12: mod_base = OTHER; note = 2'-O-methyluridine-3'-phosphate
  modified_base 13: mod_base = OTHER; note = 2'-O-methylcytidine-3'-phosphate
  modified_base 14: mod_base = OTHER; note = 2'-O-methylguanosine-3'-phosphate
  modified_base 15: mod_base = OTHER; note = 2'-O-methyluridine-3'-phosphate
  modified_base 16: mod_base = OTHER; note = 2'-O-methylcytidine-3'-phosphate
  modified_base 17: mod_base = OTHER; note = 2'-O-methyladenosine-3'-phosphate
  modified_base 18: mod_base = OTHER; note = 2'-O-methyluridine-3'-phosphate
  modified_base 19: mod_base = OTHER; note = 2'-O-methylcytidine-3'-phosphate
  modified_base 20: mod_base = OTHER; note = 2'-O-methyluridine-3'-phosphate
  modified_base 21: mod_base = OTHER; note 2'-O-methyladenosine-3'-phosphate-N-[tris(GalNAc-alkyl)-ami dodecanoyl)]-4-hydroxyprolinol
atctgtgctcttcgtcatcta

SEQ ID NO: 1749 - RNA, 21 nt, synthetic construct
  source 1..21: mol_type = other RNA
  modified_base 1: mod_base = OTHER; note = 2'-O-methyluridine-3'-phosphorothioate
  modified_base 2: mod_base = OTHER; note = 2'-O-methylcytidine-3'-phosphorothioate
  modified_base 3: mod_base = OTHER; note = 2'-O-methyluridine-3'-phosphate
  modified_base 4: mod_base = OTHER; note = 2'-O-methylguanosine-3'-phosphate
  modified_base 5: mod_base = OTHER; note = 2'-O-methyluridine-3'-phosphate
  modified_base 6: mod_base = OTHER; note = 2'-O-methylguanosine-3'-phosphate
  modified_base 7: mod_base = OTHER; note = 2'-fluorocytidine-3'-phosphate
  modified_base 8: mod_base = OTHER; note = 2'-O-methyluridine-3'-phosphate
  modified_base 9: mod_base = OTHER; note = 2'-fluorocytidine-3'-phosphate
  modified_base 10: mod_base = OTHER; note = 2'-fluorouridine-3'-phosphate
  modified_base 11: mod_base = OTHER; note = 2'-fluorouridine-3'-phosphate
  modified_base 12: mod_base = OTHER; note = 2'-O-methylcytidine-3'-phosphate
  modified_base 13: mod_base = OTHER; note = 2'-O-methylguanosine-3'-phosphate
  modified_base 14: mod_base = OTHER; note = 2'-O-methyluridine-3'-phosphate
  modified_base 15: mod_base = OTHER; note = 2'-O-methylcytidine-3'-phosphate
  modified_base 16: mod_base = OTHER; note = 2'-O-methyladenosine-3'-phosphate
  modified_base 17: mod_base = OTHER; note = 2'-O-methyluridine-3'-phosphate
  modified_base 18: mod_base = OTHER; note = 2'-O-methylcytidine-3'-phosphate
  modified_base 19: mod_base = OTHER; note = 2'-O-methyluridine-3'-phosphate
  modified_base 20: mod_base = OTHER; note = 2'-O-methylguanosine-3'-phosphate
  modified_base 21: mod_base = OTHER; note 2'-O-methyladenosine-3'-phosphate-N-[tris(GalNAc-alkyl)-ami dodecanoyl)]-4-hydroxyprolinol
tctgtgctcttcgtcatctga

SEQ ID NO: 1750 - RNA, 21 nt, synthetic construct
  source 1..21: mol_type = other RNA
  modified_base 1: mod_base = OTHER; note = 2'-O-methylcytidine-3'-phosphorothioate
  modified_base 2: mod_base = OTHER; note = 2'-O-methyluridine-3'-phosphorothioate
  modified_base 3: mod_base = OTHER; note = 2'-O-methylguanosine-3'-phosphate
  modified_base 4: mod_base = OTHER; note = 2'-O-methyluridine-3'-phosphate
  modified_base 5: mod_base = OTHER; note = 2'-O-methylguanosine-3'-phosphate
  modified_base 6: mod_base = OTHER; note = 2'-O-methylcytidine-3'-phosphate
  modified_base 7: mod_base = OTHER; note = 2'-fluorouridine-3'-phosphate
  modified_base 8: mod_base = OTHER; note = 2'-O-methylcytidine-3'-phosphate
  modified_base 9: mod_base = OTHER; note = 2'-fluorouridine-3'-phosphate
  modified_base 10: mod_base = OTHER; note = 2'-fluorouridine-3'-phosphate
  modified_base 11: mod_base = OTHER; note = 2'-fluorocytidine-3'-phosphate
  modified_base 12: mod_base = OTHER; note = 2'-O-methylguanosine-3'-phosphate
  modified_base 13: mod_base = OTHER; note = 2'-O-methyluridine-3'-phosphate
  modified_base 14: mod_base = OTHER; note = 2'-O-methylcytidine-3'-phosphate
  modified_base 15: mod_base = OTHER; note = 2'-O-methyladenosine-3'-phosphate
  modified_base 16: mod_base = OTHER; note = 2'-O-methyluridine-3'-phosphate
  modified_base 17: mod_base = OTHER; note = 2'-O-methylcytidine-3'-phosphate
  modified_base 18: mod_base = OTHER; note = 2'-O-methyluridine-3'-phosphate
  modified_base 19: mod_base = OTHER; note = 2'-O-methylguanosine-3'-phosphate
  modified_base 20: mod_base = OTHER; note = 2'-O-methyladenosine-3'-phosphate
  modified_base 21: mod_base = OTHER; note 2'-O-methyladenosine-3'-phosphate-N-[tris(GalNAc-alkyl)-ami dodecanoyl)]-4-hydroxyprolinol
ctgtgctcttcgtcatctgaa

SEQ ID NO: 1751 - RNA, 21 nt, synthetic construct
  source 1..21: mol_type = other RNA
  modified_base 1: mod_base = OTHER; note = 2'-O-methyluridine-3'-phosphorothioate
  modified_base 2: mod_base = OTHER; note = 2'-O-methylguanosine-3'-phosphorothioate
  modified_base 3: mod_base = OTHER; note = 2'-O-methyluridine-3'-phosphate
  modified_base 4: mod_base = OTHER; note = 2'-O-methylguanosine-3'-phosphate
  modified_base 5: mod_base = OTHER; note = 2'-O-methylcytidine-3'-phosphate
  modified_base 6: mod_base = OTHER; note = 2'-O-methyluridine-3'-phosphate
  modified_base 7: mod_base = OTHER; note = 2'-fluorocytidine-3'-phosphate
  modified_base 8: mod_base = OTHER; note = 2'-O-methyluridine-3'-phosphate
  modified_base 9: mod_base = OTHER; note = 2'-fluorouridine-3'-phosphate
  modified_base 10: mod_base = OTHER; note = 2'-fluorocytidine-3'-phosphate
  modified_base 11: mod_base = OTHER; note = 2'-fluoroguanosine-3'-phosphate
  modified_base 12: mod_base = OTHER; note = 2'-O-methyluridine-3'-phosphate
  modified_base 13: mod_base = OTHER; note = 2'-O-methylcytidine-3'-phosphate
  modified_base 14: mod_base = OTHER; note = 2'-O-methyladenosine-3'-phosphate
  modified_base 15: mod_base = OTHER; note = 2'-O-methyluridine-3'-phosphate
  modified_base 16: mod_base = OTHER; note = 2'-O-methylcytidine-3'-phosphate
  modified_base 17: mod_base = OTHER; note = 2'-O-methyluridine-3'-phosphate
  modified_base 18: mod_base = OTHER; note = 2'-O-methylguanosine-3'-phosphate
  modified_base 19: mod_base = OTHER; note = 2'-O-methyladenosine-3'-phosphate
  modified_base 20: mod_base = OTHER; note = 2'-O-methylcytidine-3'-phosphate
  modified_base 21: mod_base = OTHER; note 2'-O-methyladenosine-3'-phosphate-N-[tris(GalNAc-alkyl)-ami dodecanoyl)]-4-hydroxyprolinol
tgtgctcttcgtcatctgaca

SEQ ID NO: 1752 - RNA, 21 nt, synthetic construct
  source 1..21: mol_type = other RNA
  modified_base 1: mod_base = OTHER; note = 2'-O-methylguanosine-3'-phosphorothioate
  modified_base 2: mod_base = OTHER; note = 2'-O-methyluridine-3'-phosphorothioate
  modified_base 3: mod_base = OTHER; note = 2'-O-methylguanosine-3'-phosphate
  modified_base 4: mod_base = OTHER; note = 2'-O-methylcytidine-3'-phosphate
  modified_base 5: mod_base = OTHER; note = 2'-O-methyluridine-3'-phosphate
  modified_base 6: mod_base = OTHER; note = 2'-O-methylcytidine-3'-phosphate
  modified_base 7: mod_base = OTHER; note = 2'-fluorouridine-3'-phosphate
  modified_base 8: mod_base = OTHER; note = 2'-O-methyluridine-3'-phosphate
  modified_base 9: mod_base = OTHER; note = 2'-fluorocytidine-3'-phosphate
  modified_base 10: mod_base = OTHER; note = 2'-fluoroguanosine-3'-phosphate
  modified_base 11: mod_base = OTHER; note = 2'-fluorouridine-3'-phosphate
  modified_base 12: mod_base = OTHER; note = 2'-O-methylcytidine-3'-phosphate
  modified_base 13: mod_base = OTHER; note = 2'-O-methyladenosine-3'-phosphate
  modified_base 14: mod_base = OTHER; note = 2'-O-methyluridine-3'-phosphate
  modified_base 15: mod_base = OTHER; note = 2'-O-methylcytidine-3'-phosphate
  modified_base 16: mod_base = OTHER; note = 2'-O-methyluridine-3'-phosphate
  modified_base 17: mod_base = OTHER; note = 2'-O-methylguanosine-3'-phosphate
  modified_base 18: mod_base = OTHER; note = 2'-O-methyladenosine-3'-phosphate
  modified_base 19: mod_base = OTHER; note = 2'-O-methylcytidine-3'-phosphate
  modified_base 20: mod_base = OTHER; note = 2'-O-methylcytidine-3'-phosphate
  modified_base 21: mod_base = OTHER; note 2'-O-methyladenosine-3'-phosphate-N-[tris(GalNAc-alkyl)-ami dodecanoyl)]-4-hydroxyprolinol
gtgctcttcgtcatctgacca

SEQ ID NO: 1753 - RNA, 21 nt, synthetic construct
  source 1..21: mol_type = other RNA
  modified_base 1: mod_base = OTHER; note = 2'-O-methyladenosine-3'-phosphorothioate
  modified_base 2: mod_base = OTHER; note = 2'-O-methylcytidine-3'-phosphorothioate
  modified_base 3: mod_base = OTHER; note = 2'-O-methyluridine-3'-phosphate
  modified_base 4: mod_base = OTHER; note = 2'-O-methylguanosine-3'-phosphate
  modified_base 5: mod_base = OTHER; note = 2'-O-methyluridine-3'-phosphate
  modified_base 6: mod_base = OTHER; note = 2'-O-methyluridine-3'-phosphate
  modified_base 7: mod_base = OTHER; note = 2'-fluoroguanosine-3'-phosphate
  modified_base 8: mod_base = OTHER; note = 2'-O-methylguanosine-3'-phosphate
  modified_base 9: mod_base = OTHER; note = 2'-fluoroadenosine-3'-phosphate
  modified_base 10: mod_base = OTHER; note = 2'-fluorouridine-3'-phosphate
  modified_base 11: mod_base = OTHER; note = 2'-fluorouridine-3'-phosphate
  modified_base 12: mod_base = OTHER; note = 2'-O-methylguanosine-3'-phosphate
  modified_base 13: mod_base = OTHER; note = 2'-O-methyladenosine-3'-phosphate
  modified_base 14: mod_base = OTHER; note = 2'-O-methyluridine-3'-phosphate
  modified_base 15: mod_base = OTHER; note = 2'-O-methyluridine-3'-phosphate
  modified_base 16: mod_base = OTHER; note = 2'-O-methylcytidine-3'-phosphate
  modified_base 17: mod_base = OTHER; note = 2'-O-methylguanosine-3'-phosphate
  modified_base 18: mod_base = OTHER; note = 2'-O-methyladenosine-3'-phosphate
  modified_base 19: mod_base = OTHER; note = 2'-O-methyladenosine-3'-phosphate
  modified_base 20: mod_base = OTHER; note = 2'-O-methyladenosine-3'-phosphate
  modified_base 21: mod_base = OTHER; note 2'-O-methyladenosine-3'-phosphate-N-[tris(GalNAc-alkyl)-ami dodecanoyl)]-4-hydroxyprolinol
actgttggattgattcgaaaa

SEQ ID NO: 1754 - RNA, 21 nt, synthetic construct
  source 1..21: mol_type = other RNA
  modified_base 1: mod_base = OTHER; note = 2'-O-methyladenosine-3'-phosphorothioate
  modified_base 2: mod_base = OTHER; note = 2'-O-methyladenosine-3'-phosphorothioate
  modified_base 3: mod_base = OTHER; note = 2'-O-methyladenosine-3'-phosphate
  modified_base 4: mod_base = OTHER; note = 2'-O-methyluridine-3'-phosphate
  modified_base 5: mod_base = OTHER; note = 2'-O-methyladenosine-3'-phosphate
  modified_base 6: mod_base = OTHER; note = 2'-O-methylcytidine-3'-phosphate
  modified_base 7: mod_base = OTHER; note = 2'-fluorocytidine-3'-phosphate
  modified_base 8: mod_base = OTHER; note = 2'-O-methyladenosine-3'-phosphate
  modified_base 9: mod_base = OTHER; note = 2'-fluorouridine-3'-phosphate
  modified_base 10: mod_base = OTHER; note = 2'-fluorouridine-3'-phosphate
  modified_base 11: mod_base = OTHER; note = 2'-fluorocytidine-3'-phosphate
  modified_base 12: mod_base = OTHER; note = 2'-O-methylcytidine-3'-phosphate
  modified_base 13: mod_base = OTHER; note = 2'-O-methyladenosine-3'-phosphate
  modified_base 14: mod_base = OTHER; note = 2'-O-methyluridine-3'-phosphate
  modified_base 15: mod_base = OTHER; note = 2'-O-methyluridine-3'-phosphate
  modified_base 16: mod_base = OTHER; note = 2'-O-methylguanosine-3'-phosphate
  modified_base 17: mod_base = OTHER; note = 2'-O-methyluridine-3'-phosphate
  modified_base 18: mod_base = OTHER; note = 2'-O-methyluridine-3'-phosphate
  modified_base 19: mod_base = OTHER; note = 2'-O-methyluridine-3'-phosphate
  modified_base 20: mod_base = OTHER; note = 2'-O-methylguanosine-3'-phosphate
  modified_base 21: mod_base = OTHER; note 2'-O-methyladenosine-3'-phosphate-N-[tris(GalNAc-alkyl)-ami dodecanoyl)]-4-hydroxyprolinol
aaataccattccattgtttga

SEQ ID NO: 1755 - RNA, 21 nt, synthetic construct
  source 1..21: mol_type = other RNA
  modified_base 1: mod_base = OTHER; note = 2'-O-methyluridine-3'-phosphorothioate
  modified_base 2: mod_base = OTHER; note = 2'-O-methyladenosine-3'-phosphorothioate
  modified_base 3: mod_base = OTHER; note = 2'-O-methylcytidine-3'-phosphate
  modified_base 4: mod_base = OTHER; note = 2'-O-methylcytidine-3'-phosphate
  modified_base 5: mod_base = OTHER; note = 2'-O-methyladenosine-3'-phosphate
  modified_base 6: mod_base = OTHER; note = 2'-O-methyluridine-3'-phosphate
  modified_base 7: mod_base = OTHER; note = 2'-fluorouridine-3'-phosphate
  modified_base 8: mod_base = OTHER; note = 2'-O-methylcytidine-3'-phosphate
  modified_base 9: mod_base = OTHER; note = 2'-fluorocytidine-3'-phosphate
  modified_base 10: mod_base = OTHER; note = 2'-fluoroadenosine-3'-phosphate
  modified_base 11: mod_base = OTHER; note = 2'-fluorouridine-3'-phosphate
  modified_base 12: mod_base = OTHER; note = 2'-O-methyluridine-3'-phosphate
  modified_base 13: mod_base = OTHER; note = 2'-O-methylguanosine-3'-phosphate
  modified_base 14: mod_base = OTHER; note = 2'-O-methyluridine-3'-phosphate
  modified_base 15: mod_base = OTHER; note = 2'-O-methyluridine-3'-phosphate
  modified_base 16: mod_base = OTHER; note = 2'-O-methyluridine-3'-phosphate
  modified_base 17: mod_base = OTHER; note = 2'-O-methylguanosine-3'-phosphate
  modified_base 18: mod_base = OTHER; note = 2'-O-methyluridine-3'-phosphate
  modified_base 19: mod_base = OTHER; note = 2'-O-methylguanosine-3'-phosphate
  modified_base 20: mod_base = OTHER; note = 2'-O-methylcytidine-3'-phosphate
  modified_base 21: mod_base = OTHER; note 2'-O-methyladenosine-3'-phosphate-N-[tris(GalNAc-alkyl)-ami dodecanoyl)]-4-hydroxyprolinol
taccattccattgtttgtgca

SEQ ID NO: 1756 - RNA, 21 nt, synthetic construct
  source 1..21: mol_type = other RNA
  modified_base 1: mod_base = OTHER; note = 2'-O-methylcytidine-3'-phosphorothioate
  modified_base 2: mod_base = OTHER; note = 2'-O-methylcytidine-3'-phosphorothioate
  modified_base 3: mod_base = OTHER; note = 2'-O-methyladenosine-3'-phosphate
  modified_base 4: mod_base = OTHER; note = 2'-O-methyluridine-3'-phosphate
  modified_base 5: mod_base = OTHER; note = 2'-O-methyluridine-3'-phosphate
  modified_base 6: mod_base = OTHER; note = 2'-O-methylcytidine-3'-phosphate
  modified_base 7: mod_base = OTHER; note = 2'-fluorocytidine-3'-phosphate
  modified_base 8: mod_base = OTHER; note = 2'-O-methyladenosine-3'-phosphate
  modified_base 9: mod_base = OTHER; note = 2'-fluorouridine-3'-phosphate
  modified_base 10: mod_base = OTHER; note = 2'-fluorouridine-3'-phosphate
  modified_base 11: mod_base = OTHER; note = 2'-fluoroguanosine-3'-phosphate
  modified_base 12: mod_base = OTHER; note = 2'-O-methyluridine-3'-phosphate
  modified_base 13: mod_base = OTHER; note = 2'-O-methyluridine-3'-phosphate
  modified_base 14: mod_base = OTHER; note = 2'-O-methyluridine-3'-phosphate
  modified_base 15: mod_base = OTHER; note = 2'-O-methylguanosine-3'-phosphate
  modified_base 16: mod_base = OTHER; note = 2'-O-methyluridine-3'-phosphate
  modified_base 17: mod_base = OTHER; note = 2'-O-methylguanosine-3'-phosphate
  modified_base 18: mod_base = OTHER; note = 2'-O-methylcytidine-3'-phosphate
  modified_base 19: mod_base = OTHER; note = 2'-O-methyladenosine-3'-phosphate
  modified_base 20: mod_base = OTHER; note = 2'-O-methylguanosine-3'-phosphate
  modified_base 21: mod_base = OTHER; note 2'-O-methyladenosine-3'-phosphate-N-[tris(GalNAc-alkyl)-ami dodecanoyl)]-4-hydroxyprolinol
ccattccattgtttgtgcaga

SEQ ID NO: 1757 - RNA, 21 nt, synthetic construct
  source 1..21: mol_type = other RNA
  modified_base 1: mod_base = OTHER; note = 2'-O-methylguanosine-3'-phosphorothioate
  modified_base 2: mod_base = OTHER; note = 2'-O-methyluridine-3'-phosphorothioate
  modified_base 3: mod_base = OTHER; note = 2'-O-methylcytidine-3'-phosphate
  modified_base 4: mod_base = OTHER; note = 2'-O-methylcytidine-3'-phosphate
  modified_base 5: mod_base = OTHER; note = 2'-O-methyluridine-3'-phosphate
  modified_base 6: mod_base = OTHER; note = 2'-O-methylcytidine-3'-phosphate
  modified_base 7: mod_base = OTHER; note = 2'-fluorouridine-3'-phosphate
  modified_base 8: mod_base = OTHER; note = 2'-O-methylguanosine-3'-phosphate
  modified_base 9: mod_base = OTHER; note = 2'-fluorouridine-3'-phosphate
  modified_base 10: mod_base = OTHER; note = 2'-fluoroguanosine-3'-phosphate
  modified_base 11: mod_base = OTHER; note = 2'-fluoroadenosine-3'-phosphate
  modified_base 12: mod_base = OTHER; note = 2'-O-methyladenosine-3'-phosphate
  modified_base 13: mod_base = OTHER; note = 2'-O-methylcytidine-3'-phosphate
  modified_base 14: mod_base = OTHER; note = 2'-O-methyluridine-3'-phosphate
  modified_base 15: mod_base = OTHER; note = 2'-O-methyluridine-3'-phosphate
  modified_base 16: mod_base = OTHER; note = 2'-O-methylguanosine-3'-phosphate
  modified_base 17: mod_base = OTHER; note = 2'-O-methylcytidine-3'-phosphate
  modified_base 18: mod_base = OTHER; note = 2'-O-methyluridine-3'-phosphate
  modified_base 19: mod_base = OTHER; note = 2'-O-methylcytidine-3'-phosphate
  modified_base 20: mod_base = OTHER; note = 2'-O-methyladenosine-3'-phosphate
  modified_base 21: mod_base = OTHER; note 2'-O-methyladenosine-3'-phosphate-N-[tris(GalNAc-alkyl)-ami dodecanoyl)]-4-hydroxyprolinol
gtcctctgtgaacttgctcaa

SEQ ID NO: 1758 - RNA, 21 nt, synthetic construct
  source 1..21: mol_type = other RNA
  modified_base 1: mod_base = OTHER; note = 2'-O-methyluridine-3'-phosphorothioate
  modified_base 2: mod_base = OTHER; note = 2'-O-methylcytidine-3'-phosphorothioate
  modified_base 3: mod_base = OTHER; note = 2'-O-methylcytidine-3'-phosphate
  modified_base 4: mod_base = OTHER; note = 2'-O-methyluridine-3'-phosphate
  modified_base 5: mod_base = OTHER; note = 2'-O-methylcytidine-3'-phosphate
  modified_base 6: mod_base = OTHER; note = 2'-O-methyluridine-3'-phosphate
  modified_base 7: mod_base = OTHER; note = 2'-fluoroguanosine-3'-phosphate
  modified_base 8: mod_base = OTHER; note = 2'-O-methyluridine-3'-phosphate
  modified_base 9: mod_base = OTHER; note = 2'-fluoroguanosine-3'-phosphate
  modified_base 10: mod_base = OTHER; note = 2'-fluoroadenosine-3'-phosphate
  modified_base 11: mod_base = OTHER; note = 2'-fluoroadenosine-3'-phosphate
  modified_base 12: mod_base = OTHER; note = 2'-O-methylcytidine-3'-phosphate
  modified_base 13: mod_base = OTHER; note = 2'-O-methyluridine-3'-phosphate
  modified_base 14: mod_base = OTHER; note = 2'-O-methyluridine-3'-phosphate
  modified_base 15: mod_base = OTHER; note = 2'-O-methylguanosine-3'-phosphate
  modified_base 16: mod_base = OTHER; note = 2'-O-methylcytidine-3'-phosphate
  modified_base 17: mod_base = OTHER; note = 2'-O-methyluridine-3'-phosphate
  modified_base 18: mod_base = OTHER; note = 2'-O-methylcytidine-3'-phosphate
  modified_base 19: mod_base = OTHER; note = 2'-O-methyladenosine-3'-phosphate
  modified_base 20: mod_base = OTHER; note = 2'-O-methylguanosine-3'-phosphate
  modified_base 21: mod_base = OTHER; note 2'-O-methyladenosine-3'-phosphate-N-[tris(GalNAc-alkyl)-ami dodecanoyl)]-4-hydroxyprolinol
tcctctgtgaacttgctcaga

SEQ ID NO: 1759 - RNA, 21 nt, synthetic construct
  source 1..21: mol_type = other RNA
  modified_base 1: mod_base = OTHER; note = 2'-O-methyladenosine-3'-phosphorothioate
  modified_base 2: mod_base = OTHER; note = 2'-O-methyluridine-3'-phosphorothioate
  modified_base 3: mod_base = OTHER; note = 2'-O-methylcytidine-3'-phosphate
  modified_base 4: mod_base = OTHER; note = 2'-O-methylguanosine-3'-phosphate
  modified_base 5: mod_base = OTHER; note = 2'-O-methyluridine-3'-phosphate
  modified_base 6: mod_base = OTHER; note = 2'-O-methyluridine-3'-phosphate
  modified_base 7: mod_base = OTHER; note = 2'-fluorocytidine-3'-phosphate
  modified_base 8: mod_base = OTHER; note = 2'-O-methyluridine-3'-phosphate
  modified_base 9: mod_base = OTHER; note = 2'-fluorouridine-3'-phosphate
  modified_base 10: mod_base = OTHER; note = 2'-fluorouridine-3'-phosphate
  modified_base 11: mod_base = OTHER; note = 2'-fluorouridine-3'-phosphate
  modified_base 12: mod_base = OTHER; note = 2'-O-methylcytidine-3'-phosphate
  modified_base 13: mod_base = OTHER; note = 2'-O-methyladenosine-3'-phosphate
  modified_base 14: mod_base = OTHER; note = 2'-O-methylcytidine-3'-phosphate
  modified_base 15: mod_base = OTHER; note = 2'-O-methyluridine-3'-phosphate
  modified_base 16: mod_base = OTHER; note = 2'-O-methylcytidine-3'-phosphate
  modified_base 17: mod_base = OTHER; note = 2'-O-methyluridine-3'-phosphate
  modified_base 18: mod_base = OTHER; note = 2'-O-methylguanosine-3'-phosphate
  modified_base 19: mod_base = OTHER; note = 2'-O-methylguanosine-3'-phosphate
  modified_base 20: mod_base = OTHER; note = 2'-O-methyluridine-3'-phosphate
  modified_base 21: mod_base = OTHER; note 2'-O-methyladenosine-3'-phosphate-N-[tris(GalNAc-alkyl)-ami dodecanoyl)]-4-hydroxyprolinol
atcgttcttttcactctggta

SEQ ID NO: 1760 - RNA, 21 nt, synthetic construct
  source 1..21: mol_type = other RNA
  modified_base 1: mod_base = OTHER; note = 2'-O-methyluridine-3'-phosphorothioate
  modified_base 2: mod_base = OTHER; note = 2'-O-methylcytidine-3'-phosphorothioate
  modified_base 3: mod_base = OTHER; note = 2'-O-methylguanosine-3'-phosphate
  modified_base 4: mod_base = OTHER; note = 2'-O-methyluridine-3'-phosphate
  modified_base 5: mod_base = OTHER; note = 2'-O-methyluridine-3'-phosphate
  modified_base 6: mod_base = OTHER; note = 2'-O-methylcytidine-3'-phosphate
  modified_base 7: mod_base = OTHER; note = 2'-fluorouridine-3'-phosphate
  modified_base 8: mod_base = OTHER; note = 2'-O-methyluridine-3'-phosphate
  modified_base 9: mod_base = OTHER; note = 2'-fluorouridine-3'-phosphate
  modified_base 10: mod_base = OTHER; note = 2'-fluorouridine-3'-phosphate
  modified_base 11: mod_base = OTHER; note = 2'-fluorocytidine-3'-phosphate
  modified_base 12: mod_base = OTHER; note = 2'-O-methyladenosine-3'-phosphate
  modified_base 13: mod_base = OTHER; note = 2'-O-methylcytidine-3'-phosphate
  modified_base 14: mod_base = OTHER; note = 2'-O-methyluridine-3'-phosphate
  modified_base 15: mod_base = OTHER; note = 2'-O-methylcytidine-3'-phosphate
  modified_base 16: mod_base = OTHER; note = 2'-O-methyluridine-3'-phosphate
  modified_base 17: mod_base = OTHER; note = 2'-O-methylguanosine-3'-phosphate
  modified_base 18: mod_base = OTHER; note = 2'-O-methylguanosine-3'-phosphate
  modified_base 19: mod_base = OTHER; note = 2'-O-methyluridine-3'-phosphate
  modified_base 20: mod_base = OTHER; note = 2'-O-methylguanosine-3'-phosphate
  modified_base 21: mod_base = OTHER; note 2'-O-methyladenosine-3'-phosphate-N-[tris(GalNAc-alkyl)-ami dodecanoyl)]-4-hydroxyprolinol
tcgttcttttcactctggtga

SEQ ID NO: 1761 - RNA, 21 nt, synthetic construct
  source 1..21: mol_type = other RNA
  modified_base 1: mod_base = OTHER; note = 2'-O-methyluridine-3'-phosphorothioate
  modified_base 2: mod_base = OTHER; note = 2'-O-methylguanosine-3'-phosphorothioate
  modified_base 3: mod_base = OTHER; note = 2'-O-methylguanosine-3'-phosphate
  modified_base 4: mod_base = OTHER; note = 2'-O-methyluridine-3'-phosphate
  modified_base 5: mod_base = OTHER; note = 2'-O-methylguanosine-3'-phosphate
  modified_base 6: mod_base = OTHER; note = 2'-O-methylcytidine-3'-phosphate
  modified_base 7: mod_base = OTHER; note = 2'-fluorouridine-3'-phosphate
  modified_base 8: mod_base = OTHER; note = 2'-O-methylguanosine-3'-phosphate
  modified_base 9: mod_base = OTHER; note = 2'-fluoroadenosine-3'-phosphate
  modified_base 10: mod_base = OTHER; note = 2'-fluorocytidine-3'-phosphate
  modified_base 11: mod_base = OTHER; note = 2'-fluorouridine-3'-phosphate
  modified_base 12: mod_base = OTHER; note = 2'-O-methyladenosine-3'-phosphate
  modified_base 13: mod_base = OTHER; note = 2'-O-methyluridine-3'-phosphate
  modified_base 14: mod_base = OTHER; note = 2'-O-methylcytidine-3'-phosphate
  modified_base 15: mod_base = OTHER; note = 2'-O-methylcytidine-3'-phosphate
  modified_base 16: mod_base = OTHER; note = 2'-O-methyladenosine-3'-phosphate
  modified_base 17: mod_base = OTHER; note = 2'-O-methylguanosine-3'-phosphate
  modified_base 18: mod_base = OTHER; note = 2'-O-methyluridine-3'-phosphate
  modified_base 19: mod_base = OTHER; note = 2'-O-methyluridine-3'-phosphate
  modified_base 20: mod_base = OTHER; note = 2'-O-methylguanosine-3'-phosphate
  modified_base 21: mod_base = OTHER; note 2'-O-methyladenosine-3'-phosphate-N-[tris(GalNAc-alkyl)-ami dodecanoyl)]-4-hydroxyprolinol
tggtgctgactatccagttga

SEQ ID NO: 1762 - RNA, 21 nt, synthetic construct
  source 1..21: mol_type = other RNA
  modified_base 1: mod_base = OTHER; note = 2'-O-methylguanosine-3'-phosphorothioate
  modified_base 2: mod_base = OTHER; note = 2'-O-methylcytidine-3'-phosphorothioate
  modified_base 3: mod_base = OTHER; note = 2'-O-methyluridine-3'-phosphate
  modified_base 4: mod_base = OTHER; note = 2'-O-methylguanosine-3'-phosphate
  modified_base 5: mod_base = OTHER; note = 2'-O-methyladenosine-3'-phosphate
  modified_base 6: mod_base = OTHER; note = 2'-O-methylcytidine-3'-phosphate
  modified_base 7: mod_base = OTHER; note = 2'-fluorouridine-3'-phosphate
  modified_base 8: mod_base = OTHER; note = 2'-O-methyladenosine-3'-phosphate
  modified_base 9: mod_base = OTHER; note = 2'-fluorouridine-3'-phosphate
  modified_base 10: mod_base = OTHER; note = 2'-fluorocytidine-3'-phosphate
  modified_base 11: mod_base = OTHER; note = 2'-fluorocytidine-3'-phosphate
  modified_base 12: mod_base = OTHER; note = 2'-O-methyladenosine-3'-phosphate
  modified_base 13: mod_base = OTHER; note = 2'-O-methylguanosine-3'-phosphate
  modified_base 14: mod_base = OTHER; note = 2'-O-methyluridine-3'-phosphate
  modified_base 15: mod_base = OTHER; note = 2'-O-methyluridine-3'-phosphate
  modified_base 16: mod_base = OTHER; note = 2'-O-methylguanosine-3'-phosphate
  modified_base 17: mod_base = OTHER; note = 2'-O-methyladenosine-3'-phosphate
  modified_base 18: mod_base = OTHER; note = 2'-O-methyluridine-3'-phosphate
  modified_base 19: mod_base = OTHER; note = 2'-O-methylguanosine-3'-phosphate
  modified_base 20: mod_base = OTHER; note = 2'-O-methylguanosine-3'-phosphate
  modified_base 21: mod_base = OTHER; note 2'-O-methyladenosine-3'-phosphate-N-[tris(GalNAc-alkyl)-ami dodecanoyl)]-4-hydroxyprolinol
gctgactatccagttgatgga

SEQ ID NO: 1763 - RNA, 21 nt, synthetic construct
  source 1..21: mol_type = other RNA
  modified_base 1: mod_base = OTHER; note = 2'-O-methylcytidine-3'-phosphorothioate
  modified_base 2: mod_base = OTHER; note = 2'-O-methyluridine-3'-phosphorothioate
  modified_base 3: mod_base = OTHER; note = 2'-O-methylguanosine-3'-phosphate
  modified_base 4: mod_base = OTHER; note = 2'-O-methyladenosine-3'-phosphate
  modified_base 5: mod_base = OTHER; note = 2'-O-methylcytidine-3'-phosphate
  modified_base 6: mod_base = OTHER; note = 2'-O-methyluridine-3'-phosphate
  modified_base 7: mod_base = OTHER; note = 2'-fluoroadenosine-3'-phosphate
  modified_base 8: mod_base = OTHER; note = 2'-O-methyluridine-3'-phosphate
  modified_base 9: mod_base = OTHER; note = 2'-fluorocytidine-3'-phosphate
  modified_base 10: mod_base = OTHER; note = 2'-fluorocytidine-3'-phosphate
  modified_base 11: mod_base = OTHER; note = 2'-fluoroadenosine-3'-phosphate
  modified_base 12: mod_base = OTHER; note = 2'-O-methylguanosine-3'-phosphate
  modified_base 13: mod_base = OTHER; note = 2'-O-methyluridine-3'-phosphate
  modified_base 14: mod_base = OTHER; note = 2'-O-methyluridine-3'-phosphate
  modified_base 15: mod_base = OTHER; note = 2'-O-methylguanosine-3'-phosphate
  modified_base 16: mod_base = OTHER; note = 2'-O-methyladenosine-3'-phosphate
  modified_base 17: mod_base = OTHER; note = 2'-O-methyluridine-3'-phosphate
  modified_base 18: mod_base = OTHER; note = 2'-O-methylguanosine-3'-phosphate
  modified_base 19: mod_base = OTHER; note = 2'-O-methylguanosine-3'-phosphate
  modified_base 20: mod_base = OTHER; note = 2'-O-methylguanosine-3'-phosphate
  modified_base 21: mod_base = OTHER; note 2'-O-methyladenosine-3'-phosphate-N-[tris(GalNAc-alkyl)-ami dodecanoyl)]-4-hydroxyprolinol
ctgactatccagttgatggga

SEQ ID NO: 1764 - RNA, 21 nt, synthetic construct
  source 1..21: mol_type = other RNA
  modified_base 1: mod_base = OTHER; note = 2'-O-methylguanosine-3'-phosphorothioate
  modified_base 2: mod_base = OTHER; note = 2'-O-methyladenosine-3'-phosphorothioate
  modified_base 3: mod_base = OTHER; note = 2'-O-methylcytidine-3'-phosphate
  modified_base 4: mod_base = OTHER; note = 2'-O-methyluridine-3'-phosphate
  modified_base 5: mod_base = OTHER; note = 2'-O-methyladenosine-3'-phosphate
  modified_base 6: mod_base = OTHER; note = 2'-O-methyluridine-3'-phosphate
  modified_base 7: mod_base = OTHER; note = 2'-fluorocytidine-3'-phosphate
  modified_base 8: mod_base = OTHER; note = 2'-O-methylcytidine-3'-phosphate
  modified_base 9: mod_base = OTHER; note = 2'-fluoroadenosine-3'-phosphate
  modified_base 10: mod_base = OTHER; note = 2'-fluoroguanosine-3'-phosphate
  modified_base 11: mod_base = OTHER; note = 2'-fluorouridine-3'-phosphate
  modified_base 12: mod_base = OTHER; note = 2'-O-methyluridine-3'-phosphate
  modified_base 13: mod_base = OTHER; note = 2'-O-methylguanosine-3'-phosphate
  modified_base 14: mod_base = OTHER; note = 2'-O-methyladenosine-3'-phosphate
  modified_base 15: mod_base = OTHER; note = 2'-O-methyluridine-3'-phosphate
  modified_base 16: mod_base = OTHER; note = 2'-O-methylguanosine-3'-phosphate
  modified_base 17: mod_base = OTHER; note = 2'-O-methylguanosine-3'-phosphate
  modified_base 18: mod_base = OTHER; note = 2'-O-methylguanosine-3'-phosphate
  modified_base 19: mod_base = OTHER; note = 2'-O-methylcytidine-3'-phosphate
  modified_base 20: mod_base = OTHER; note = 2'-O-methyluridine-3'-phosphate
  modified_base 21: mod_base = OTHER; note 2'-O-methyladenosine-3'-phosphate-N-[tris(GalNAc-alkyl)-ami dodecanoyl)]-4-hydroxyprolinol
gactatccagttgatgggcta

SEQ ID NO: 1765 - RNA, 21 nt, synthetic construct
  source 1..21: mol_type = other RNA
  modified_base 1: mod_base = OTHER; note = 2'-O-methyladenosine-3'-phosphorothioate
  modified_base 2: mod_base = OTHER; note = 2'-O-methyluridine-3'-phosphorothioate
  modified_base 3: mod_base = OTHER; note = 2'-O-methyluridine-3'-phosphate
  modified_base 4: mod_base = OTHER; note = 2'-O-methylguanosine-3'-phosphate
  modified_base 5: mod_base = OTHER; note = 2'-O-methylguanosine-3'-phosphate
  modified_base 6: mod_base = OTHER; note = 2'-O-methylcytidine-3'-phosphate
  modified_base 7: mod_base = OTHER; note = 2'-fluorocytidine-3'-phosphate
  modified_base 8: mod_base = OTHER; note = 2'-O-methyluridine-3'-phosphate
  modified_base 9: mod_base = OTHER; note = 2'-fluoroguanosine-3'-phosphate
  modified_base 10: mod_base = OTHER; note = 2'-fluorouridine-3'-phosphate
  modified_base 11: mod_base = OTHER; note = 2'-fluoroadenosine-3'-phosphate
  modified_base 12: mod_base = OTHER; note = 2'-O-methylguanosine-3'-phosphate
  modified_base 13: mod_base = OTHER; note = 2'-O-methyladenosine-3'-phosphate
  modified_base 14: mod_base = OTHER; note = 2'-O-methylguanosine-3'-phosphate
  modified_base 15: mod_base = OTHER; note = 2'-O-methyluridine-3'-phosphate
  modified_base 16: mod_base = OTHER; note = 2'-O-methyluridine-3'-phosphate
  modified_base 17: mod_base = OTHER; note = 2'-O-methylguanosine-3'-phosphate
  modified_base 18: mod_base = OTHER; note = 2'-O-methylcytidine-3'-phosphate
  modified_base 19: mod_base = OTHER; note = 2'-O-methyluridine-3'-phosphate
  modified_base 20: mod_base = OTHER; note = 2'-O-methylguanosine-3'-phosphate
  modified_base 21: mod_base = OTHER; note 2'-O-methyladenosine-3'-phosphate-N-[tris(GalNAc-alkyl)-ami dodecanoyl)]-4-hydroxyprolinol
attggcctgtagagttgctga

SEQ ID NO: 1766 - RNA, 21 nt, synthetic construct
  source 1..21: mol_type = other RNA
  modified_base 1: mod_base = OTHER; note = 2'-O-methylguanosine-3'-phosphorothioate
  modified_base 2: mod_base = OTHER; note = 2'-O-methylguanosine-3'-phosphorothioate
  modified_base 3: mod_base = OTHER; note = 2'-O-methylcytidine-3'-phosphate
  modified_base 4: mod_base = OTHER; note = 2'-O-methyluridine-3'-phosphate
  modified_base 5: mod_base = OTHER; note = 2'-O-methylguanosine-3'-phosphate
  modified_base 6: mod_base = OTHER; note = 2'-O-methylguanosine-3'-phosphate
  modified_base 7: mod_base = OTHER; note = 2'-fluorouridine-3'-phosphate
  modified_base 8: mod_base = OTHER; note = 2'-O-methyladenosine-3'-phosphate
  modified_base 9: mod_base = OTHER; note = 2'-fluorouridine-3'-phosphate
  modified_base 10: mod_base = OTHER; note = 2'-fluorocytidine-3'-phosphate
  modified_base 11: mod_base = OTHER; note = 2'-fluorouridine-3'-phosphate
  modified_base 12: mod_base = OTHER; note = 2'-O-methylcytidine-3'-phosphate
  modified_base 13: mod_base = OTHER; note = 2'-O-methyladenosine-3'-phosphate
  modified_base 14: mod_base = OTHER; note = 2'-O-methylguanosine-3'-phosphate
  modified_base 15: mod_base = OTHER; note = 2'-O-methyladenosine-3'-phosphate
  modified_base 16: mod_base = OTHER; note = 2'-O-methyladenosine-3'-phosphate
  modified_base 17: mod_base = OTHER; note = 2'-O-methyladenosine-3'-phosphate
  modified_base 18: mod_base = OTHER; note = 2'-O-methylguanosine-3'-phosphate
  modified_base 19: mod_base = OTHER; note = 2'-O-methyluridine-3'-phosphate
  modified_base 20: mod_base = OTHER; note = 2'-O-methylguanosine-3'-phosphate
  modified_base 21: mod_base = OTHER; note 2'-O-methyladenosine-3'-phosphate-N-[tris(GalNAc-alkyl)-ami dodecanoyl)]-4-hydroxyprolinol
ggctggtatctcagaaagtga

SEQ ID NO: 1767 - RNA, 21 nt, synthetic construct
  source 1..21: mol_type = other RNA
  modified_base 1: mod_base = OTHER; note = 2'-O-methylguanosine-3'-phosphorothioate
  modified_base 2: mod_base = OTHER; note = 2'-O-methylcytidine-3'-phosphorothioate
  modified_base 3: mod_base = OTHER; note = 2'-O-methyluridine-3'-phosphate
  modified_base 4: mod_base = OTHER; note = 2'-O-methylguanosine-3'-phosphate
  modified_base 5: mod_base = OTHER; note = 2'-O-methylguanosine-3'-phosphate
  modified_base 6: mod_base = OTHER; note = 2'-O-methyluridine-3'-phosphate
  modified_base 7: mod_base = OTHER; note = 2'-fluoroadenosine-3'-phosphate
  modified_base 8: mod_base = OTHER; note = 2'-O-methyluridine-3'-phosphate
  modified_base 9: mod_base = OTHER; note = 2'-fluorocytidine-3'-phosphate
  modified_base 10: mod_base = OTHER; note = 2'-fluorouridine-3'-phosphate
  modified_base 11: mod_base = OTHER; note = 2'-fluorocytidine-3'-phosphate
  modified_base 12: mod_base = OTHER; note = 2'-O-methyladenosine-3'-phosphate
  modified_base 13: mod_base = OTHER; note = 2'-O-methylguanosine-3'-phosphate
  modified_base 14: mod_base = OTHER; note = 2'-O-methyladenosine-3'-phosphate
  modified_base 15: mod_base = OTHER; note = 2'-O-methyladenosine-3'-phosphate
  modified_base 16: mod_base = OTHER; note = 2'-O-methyladenosine-3'-phosphate
  modified_base 17: mod_base = OTHER; note = 2'-O-methylguanosine-3'-phosphate
  modified_base 18: mod_base = OTHER; note = 2'-O-methyluridine-3'-phosphate
  modified_base 19: mod_base = OTHER; note = 2'-O-methylguanosine-3'-phosphate
  modified_base 20: mod_base = OTHER; note = 2'-O-methylcytidine-3'-phosphate
  modified_base 21: mod_base = OTHER; note 2'-O-methyladenosine-3'-phosphate-N-[tris(GalNAc-alkyl)-ami dodecanoyl)]-4-hydroxyprolinol
gctggtatctcagaaagtgca

SEQ ID NO: 1768 - RNA, 21 nt, synthetic construct
  source 1..21: mol_type = other RNA
  modified_base 1: mod_base = OTHER; note = 2'-O-methyluridine-3'-phosphorothioate
  modified_base 2: mod_base = OTHER; note = 2'-O-methylguanosine-3'-phosphorothioate
  modified_base 3: mod_base = OTHER; note = 2'-O-methylguanosine-3'-phosphate
  modified_base 4: mod_base = OTHER; note = 2'-O-methyluridine-3'-phosphate
  modified_base 5: mod_base = OTHER; note = 2'-O-methyladenosine-3'-phosphate
  modified_base 6: mod_base = OTHER; note = 2'-O-methyluridine-3'-phosphate
  modified_base 7: mod_base = OTHER; note = 2'-fluorocytidine-3'-phosphate
  modified_base 8: mod_base = OTHER; note = 2'-O-methyluridine-3'-phosphate
  modified_base 9: mod_base = OTHER; note = 2'-fluorocytidine-3'-phosphate
  modified_base 10: mod_base = OTHER; note = 2'-fluoroadenosine-3'-phosphate
  modified_base 11: mod_base = OTHER; note = 2'-fluoroguanosine-3'-phosphate
  modified_base 12: mod_base = OTHER; note = 2'-O-methyladenosine-3'-phosphate
  modified_base 13: mod_base = OTHER; note = 2'-O-methyladenosine-3'-phosphate
  modified_base 14: mod_base = OTHER; note = 2'-O-methyladenosine-3'-phosphate
  modified_base 15: mod_base = OTHER; note = 2'-O-methylguanosine-3'-phosphate
  modified_base 16: mod_base = OTHER; note = 2'-O-methyluridine-3'-phosphate
  modified_base 17: mod_base = OTHER; note = 2'-O-methylguanosine-3'-phosphate
  modified_base 18: mod_base = OTHER; note = 2'-O-methylcytidine-3'-phosphate
  modified_base 19: mod_base = OTHER; note = 2'-O-methylcytidine-3'-phosphate
  modified_base 20: mod_base = OTHER; note = 2'-O-methyluridine-3'-phosphate
  modified_base 21: mod_base = OTHER; note 2'-O-methyladenosine-3'-phosphate-N-[tris(GalNAc-alkyl)-ami dodecanoyl)]-4-hydroxyprolinol
tggtatctcagaaagtgccta

SEQ ID NO: 1769 - RNA, 21 nt, synthetic construct
  source 1..21: mol_type = other RNA
  modified_base 1: mod_base = OTHER; note = 2'-O-methylcytidine-3'-phosphorothioate
  modified_base 2: mod_base = OTHER; note = 2'-O-methyluridine-3'-phosphorothioate
  modified_base 3: mod_base = OTHER; note = 2'-O-methylguanosine-3'-phosphate
  modified_base 4: mod_base = OTHER; note = 2'-O-methyladenosine-3'-phosphate
  modified_base 5: mod_base = OTHER; note = 2'-O-methylcytidine-3'-phosphate
  modified_base 6: mod_base = OTHER; note = 2'-O-methyladenosine-3'-phosphate
  modified_base 7: mod_base = OTHER; note = 2'-fluorocytidine-3'-phosphate
  modified_base 8: mod_base = OTHER; note = 2'-O-methyladenosine-3'-phosphate
  modified_base 9: mod_base = OTHER; note = 2'-fluorocytidine-3'-phosphate
  modified_base 10: mod_base = OTHER; note = 2'-fluorouridine-3'-phosphate
  modified_base 11: mod_base = OTHER; note = 2'-fluoroadenosine-3'-phosphate
  modified_base 12: mod_base = OTHER; note = 2'-O-methyladenosine-3'-phosphate
  modified_base 13: mod_base = OTHER; note = 2'-O-methylcytidine-3'-phosphate
  modified_base 14: mod_base = OTHER; note = 2'-O-methylcytidine-3'-phosphate
  modified_base 15: mod_base = OTHER; note = 2'-O-methyladenosine-3'-phosphate
  modified_base 16: mod_base = OTHER; note = 2'-O-methyladenosine-3'-phosphate
  modified_base 17: mod_base = OTHER; note = 2'-O-methylguanosine-3'-phosphate
  modified_base 18: mod_base = OTHER; note = 2'-O-methylcytidine-3'-phosphate
  modified_base 19: mod_base = OTHER; note = 2'-O-methyluridine-3'-phosphate
  modified_base 20: mod_base = OTHER; note = 2'-O-methylguanosine-3'-phosphate
  modified_base 21: mod_base = OTHER; note 2'-O-methyladenosine-3'-phosphate-N-[tris(GalNAc-alkyl)-ami dodecanoyl)]-4-hydroxyprolinol
ctgacacactaaccaagctga

SEQ ID NO: 1770 - RNA, 21 nt, synthetic construct
  source 1..21: mol_type = other RNA
  modified_base 1: mod_base = OTHER; note = 2'-O-methyladenosine-3'-phosphorothioate
  modified_base 2: mod_base = OTHER; note = 2'-O-methyladenosine-3'-phosphorothioate
  modified_base 3: mod_base = OTHER; note = 2'-O-methylcytidine-3'-phosphate
  modified_base 4: mod_base = OTHER; note = 2'-O-methylcytidine-3'-phosphate
  modified_base 5: mod_base = OTHER; note = 2'-O-methyladenosine-3'-phosphate
  modified_base 6: mod_base = OTHER; note = 2'-O-methyladenosine-3'-phosphate
  modified_base 7: mod_base = OTHER; note = 2'-fluoroguanosine-3'-phosphate
  modified_base 8: mod_base = OTHER; note = 2'-O-methylcytidine-3'-phosphate
  modified_base 9: mod_base = OTHER; note = 2'-fluorouridine-3'-phosphate
  modified_base 10: mod_base = OTHER; note = 2'-fluoroguanosine-3'-phosphate
  modified_base 11: mod_base = OTHER; note = 2'-fluoroadenosine-3'-phosphate
  modified_base 12: mod_base = OTHER; note = 2'-O-methylguanosine-3'-phosphate
  modified_base 13: mod_base = OTHER; note = 2'-O-methyluridine-3'-phosphate
  modified_base 14: mod_base = OTHER; note = 2'-O-methyluridine-3'-phosphate
  modified_base 15: mod_base = OTHER; note = 2'-O-methyluridine-3'-phosphate
  modified_base 16: mod_base = OTHER; note = 2'-O-methylcytidine-3'-phosphate
  modified_base 17: mod_base = OTHER; note = 2'-O-methylcytidine-3'-phosphate
  modified_base 18: mod_base = OTHER; note = 2'-O-methyluridine-3'-phosphate
  modified_base 19: mod_base = OTHER; note = 2'-O-methyladenosine-3'-phosphate
  modified_base 20: mod_base = OTHER; note = 2'-O-methyluridine-3'-phosphate
  modified_base 21: mod_base = OTHER; note 2'-O-methyladenosine-3'-phosphate-N-[tris(GalNAc-alkyl)-ami dodecanoyl)]-4-hydroxyprolinol
aaccaagctgagtttcctata

SEQ ID NO: 1771 - RNA, 21 nt, synthetic construct
  source 1..21: mol_type = other RNA
  modified_base 1: mod_base = OTHER; note = 2'-O-methylcytidine-3'-phosphorothioate
  modified_base 2: mod_base = OTHER; note = 2'-O-methylcytidine-3'-phosphorothioate
  modified_base 3: mod_base = OTHER; note = 2'-O-methyladenosine-3'-phosphate
  modified_base 4: mod_base = OTHER; note = 2'-O-methyladenosine-3'-phosphate
  modified_base 5: mod_base = OTHER; note = 2'-O-methylguanosine-3'-phosphate
  modified_base 6: mod_base = OTHER; note = 2'-O-methylcytidine-3'-phosphate
  modified_base 7: mod_base = OTHER; note = 2'-fluorouridine-3'-phosphate
  modified_base 8: mod_base = OTHER; note = 2'-O-methylguanosine-3'-phosphate
  modified_base 9: mod_base = OTHER; note = 2'-fluoroadenosine-3'-phosphate
  modified_base 10: mod_base = OTHER; note = 2'-fluoroguanosine-3'-phosphate
  modified_base 11: mod_base = OTHER; note = 2'-fluorouridine-3'-phosphate
  modified_base 12: mod_base = OTHER; note = 2'-O-methyluridine-3'-phosphate
  modified_base 13: mod_base = OTHER; note = 2'-O-methyluridine-3'-phosphate
  modified_base 14: mod_base = OTHER; note = 2'-O-methylcytidine-3'-phosphate
  modified_base 15: mod_base = OTHER; note = 2'-O-methylcytidine-3'-phosphate
  modified_base 16: mod_base = OTHER; note = 2'-O-methyluridine-3'-phosphate
  modified_base 17: mod_base = OTHER; note = 2'-O-methyladenosine-3'-phosphate
  modified_base 18: mod_base = OTHER; note = 2'-O-methyluridine-3'-phosphate
  modified_base 19: mod_base = OTHER; note = 2'-O-methylguanosine-3'-phosphate
  modified_base 20: mod_base = OTHER; note = 2'-O-methylguanosine-3'-phosphate
  modified_base 21: mod_base = OTHER; note 2'-O-methyladenosine-3'-phosphate-N-[tris(GalNAc-alkyl)-ami dodecanoyl)]-4-hydroxyprolinol
ccaagctgagtttcctatgga

SEQ ID NO: 1772 - RNA, 21 nt, synthetic construct
  source 1..21: mol_type = other RNA
  modified_base 1: mod_base = OTHER; note = 2'-O-methylcytidine-3'-phosphorothioate
  modified_base 2: mod_base = OTHER; note = 2'-O-methyladenosine-3'-phosphorothioate
  modified_base 3: mod_base = OTHER; note = 2'-O-methyladenosine-3'-phosphate
  modified_base 4: mod_base = OTHER; note = 2'-O-methylguanosine-3'-phosphate
  modified_base 5: mod_base = OTHER; note = 2'-O-methylcytidine-3'-phosphate
  modified_base 6: mod_base = OTHER; note = 2'-O-methyluridine-3'-phosphate
  modified_base 7: mod_base = OTHER; note = 2'-fluoroguanosine-3'-phosphate
  modified_base 8: mod_base = OTHER; note = 2'-O-methyladenosine-3'-phosphate
  modified_base 9: mod_base = OTHER; note = 2'-fluoroguanosine-3'-phosphate
  modified_base 10: mod_base = OTHER; note = 2'-fluorouridine-3'-phosphate
  modified_base 11: mod_base = OTHER; note = 2'-fluorouridine-3'-phosphate
  modified_base 12: mod_base = OTHER; note = 2'-O-methyluridine-3'-phosphate
  modified_base 13: mod_base = OTHER; note = 2'-O-methylcytidine-3'-phosphate
  modified_base 14: mod_base = OTHER; note = 2'-O-methylcytidine-3'-phosphate
  modified_base 15: mod_base = OTHER; note = 2'-O-methyluridine-3'-phosphate
  modified_base 16: mod_base = OTHER; note = 2'-O-methyladenosine-3'-phosphate
  modified_base 17: mod_base = OTHER; note = 2'-O-methyluridine-3'-phosphate
  modified_base 18: mod_base = OTHER; note = 2'-O-methylguanosine-3'-phosphate
  modified_base 19: mod_base = OTHER; note = 2'-O-methylguanosine-3'-phosphate
  modified_base 20: mod_base = OTHER; note = 2'-O-methylguanosine-3'-phosphate
  modified_base 21: mod_base = OTHER; note 2'-O-methyladenosine-3'-phosphate-N-[tris(GalNAc-alkyl)-ami dodecanoyl)]-4-hydroxyprolinol
caagctgagtttcctatggga

SEQ ID NO: 1773 - RNA, 21 nt, synthetic construct
  source 1..21: mol_type = other RNA
  modified_base 1: mod_base = OTHER; note = 2'-O-methyladenosine-3'-phosphorothioate
  modified_base 2: mod_base = OTHER; note = 2'-O-methyladenosine-3'-phosphorothioate
  modified_base 3: mod_base = OTHER; note = 2'-O-methylguanosine-3'-phosphate
  modified_base 4: mod_base = OTHER; note = 2'-O-methylcytidine-3'-phosphate
  modified_base 5: mod_base = OTHER; note = 2'-O-methyluridine-3'-phosphate
  modified_base 6: mod_base = OTHER; note = 2'-O-methylguanosine-3'-phosphate
  modified_base 7: mod_base = OTHER; note = 2'-fluoroadenosine-3'-phosphate
  modified_base 8: mod_base = OTHER; note = 2'-O-methylguanosine-3'-phosphate
  modified_base 9: mod_base = OTHER; note = 2'-fluorouridine-3'-phosphate
  modified_base 10: mod_base = OTHER; note = 2'-fluorouridine-3'-phosphate
  modified_base 11: mod_base = OTHER; note = 2'-fluorouridine-3'-phosphate
  modified_base 12: mod_base = OTHER; note = 2'-O-methylcytidine-3'-phosphate
  modified_base 13: mod_base = OTHER; note = 2'-O-methylcytidine-3'-phosphate
  modified_base 14: mod_base = OTHER; note = 2'-O-methyluridine-3'-phosphate
  modified_base 15: mod_base = OTHER; note = 2'-O-methyladenosine-3'-phosphate
  modified_base 16: mod_base = OTHER; note = 2'-O-methyluridine-3'-phosphate
  modified_base 17: mod_base = OTHER; note = 2'-O-methylguanosine-3'-phosphate
  modified_base 18: mod_base = OTHER; note = 2'-O-methylguanosine-3'-phosphate
  modified_base 19: mod_base = OTHER; note = 2'-O-methylguanosine-3'-phosphate
  modified_base 20: mod_base = OTHER; note = 2'-O-methyladenosine-3'-phosphate
  modified_base 21: mod_base = OTHER; note 2'-O-methyladenosine-3'-phosphate-N-[tris(GalNAc-alkyl)-ami dodecanoyl)]-4-hydroxyprolinol
aagctgagtttcctatgggaa

SEQ ID NO: 1774 - RNA, 21 nt, synthetic construct
  source 1..21: mol_type = other RNA
  modified_base 1: mod_base = OTHER; note = 2'-O-methyladenosine-3'-phosphorothioate
  modified_base 2: mod_base = OTHER; note = 2'-O-methylguanosine-3'-phosphorothioate
  modified_base 3: mod_base = OTHER; note = 2'-O-methylcytidine-3'-phosphate
  modified_base 4: mod_base = OTHER; note = 2'-O-methyluridine-3'-phosphate
  modified_base 5: mod_base = OTHER; note = 2'-O-methylguanosine-3'-phosphate
  modified_base 6: mod_base = OTHER; note = 2'-O-methyladenosine-3'-phosphate
  modified_base 7: mod_base = OTHER; note = 2'-fluoroguanosine-3'-phosphate
  modified_base 8: mod_base = OTHER; note = 2'-O-methyluridine-3'-phosphate
  modified_base 9: mod_base = OTHER; note = 2'-fluorouridine-3'-phosphate
  modified_base 10: mod_base = OTHER; note = 2'-fluorouridine-3'-phosphate
  modified_base 11: mod_base = OTHER; note = 2'-fluorocytidine-3'-phosphate
  modified_base 12: mod_base = OTHER; note = 2'-O-methylcytidine-3'-phosphate
  modified_base 13: mod_base = OTHER; note = 2'-O-methyluridine-3'-phosphate
  modified_base 14: mod_base = OTHER; note = 2'-O-methyladenosine-3'-phosphate
  modified_base 15: mod_base = OTHER; note = 2'-O-methyluridine-3'-phosphate
  modified_base 16: mod_base = OTHER; note = 2'-O-methylguanosine-3'-phosphate
  modified_base 17: mod_base = OTHER; note = 2'-O-methylguanosine-3'-phosphate
  modified_base 18: mod_base = OTHER; note = 2'-O-methylguanosine-3'-phosphate
  modified_base 19: mod_base = OTHER; note = 2'-O-methyladenosine-3'-phosphate
  modified_base 20: mod_base = OTHER; note = 2'-O-methyladenosine-3'-phosphate
  modified_base 21: mod_base = OTHER; note 2'-O-methyladenosine-3'-phosphate-N-[tris(GalNAc-alkyl)-ami dodecanoyl)]-4-hydroxyprolinol
agctgagtttcctatgggaaa

SEQ ID NO: 1775 - RNA, 21 nt, synthetic construct
  source 1..21: mol_type = other RNA
  modified_base 1: mod_base = OTHER; note = 2'-O-methyluridine-3'-phosphorothioate
  modified_base 2: mod_base = OTHER; note = 2'-O-methyluridine-3'-phosphorothioate
  modified_base 3: mod_base = OTHER; note = 2'-O-methylguanosine-3'-phosphate
  modified_base 4: mod_base = OTHER; note = 2'-O-methyluridine-3'-phosphate
  modified_base 5: mod_base = OTHER; note = 2'-O-methyluridine-3'-phosphate
  modified_base 6: mod_base = OTHER; note = 2'-O-methylcytidine-3'-phosphate
  modified_base 7: mod_base = OTHER; note = 2'-fluorouridine-3'-phosphate
  modified_base 8: mod_base = OTHER; note = 2'-O-methylguanosine-3'-phosphate
  modified_base 9: mod_base = OTHER; note = 2'-fluoroguanosine-3'-phosphate
  modified_base 10: mod_base = OTHER; note = 2'-fluorouridine-3'-phosphate
  modified_base 11: mod_base = OTHER; note = 2'-fluorocytidine-3'-phosphate
  modified_base 12: mod_base = OTHER; note = 2'-O-methylcytidine-3'-phosphate
  modified_base 13: mod_base = OTHER; note = 2'-O-methyluridine-3'-phosphate
  modified_base 14: mod_base = OTHER; note = 2'-O-methyluridine-3'-phosphate
  modified_base 15: mod_base = OTHER; note = 2'-O-methyluridine-3'-phosphate
  modified_base 16: mod_base = OTHER; note = 2'-O-methyluridine-3'-phosphate
  modified_base 17: mod_base = OTHER; note = 2'-O-methyluridine-3'-phosphate
  modified_base 18: mod_base = OTHER; note = 2'-O-methylguanosine-3'-phosphate
  modified_base 19: mod_base = OTHER; note = 2'-O-methylguanosine-3'-phosphate
  modified_base 20: mod_base = OTHER; note = 2'-O-methyluridine-3'-phosphate
  modified_base 21: mod_base = OTHER; note 2'-O-methyladenosine-3'-phosphate-N-[tris(GalNAc-alkyl)-ami dodecanoyl)]-4-hydroxyprolinol
ttgttctggtcctttttggta

SEQ ID NO: 1776 - RNA, 21 nt, synthetic construct
  source 1..21: mol_type = other RNA
  modified_base 1: mod_base = OTHER; note = 2'-O-methyluridine-3'-phosphorothioate
  modified_base 2: mod_base = OTHER; note = 2'-O-methylguanosine-3'-phosphorothioate
  modified_base 3: mod_base = OTHER; note = 2'-O-methyluridine-3'-phosphate
  modified_base 4: mod_base = OTHER; note = 2'-O-methyluridine-3'-phosphate
  modified_base 5: mod_base = OTHER; note = 2'-O-methylcytidine-3'-phosphate
  modified_base 6: mod_base = OTHER; note = 2'-O-methyluridine-3'-phosphate
  modified_base 7: mod_base = OTHER; note = 2'-fluoroguanosine-3'-phosphate
  modified_base 8: mod_base = OTHER; note = 2'-O-methylguanosine-3'-phosphate
  modified_base 9: mod_base = OTHER; note = 2'-fluorouridine-3'-phosphate
  modified_base 10: mod_base = OTHER; note = 2'-fluorocytidine-3'-phosphate
  modified_base 11: mod_base = OTHER; note = 2'-fluorocytidine-3'-phosphate
  modified_base 12: mod_base = OTHER; note = 2'-O-methyluridine-3'-phosphate
  modified_base 13: mod_base = OTHER; note = 2'-O-methyluridine-3'-phosphate
  modified_base 14: mod_base = OTHER; note = 2'-O-methyluridine-3'-phosphate
  modified_base 15: mod_base = OTHER; note = 2'-O-methyluridine-3'-phosphate
  modified_base 16: mod_base = OTHER; note = 2'-O-methyluridine-3'-phosphate
  modified_base 17: mod_base = OTHER; note = 2'-O-methylguanosine-3'-phosphate
  modified_base 18: mod_base = OTHER; note = 2'-O-methylguanosine-3'-phosphate
  modified_base 19: mod_base = OTHER; note = 2'-O-methyluridine-3'-phosphate
  modified_base 20: mod_base = OTHER; note = 2'-O-methylcytidine-3'-phosphate
  modified_base 21: mod_base = OTHER; note 2'-O-methyladenosine-3'-phosphate-N-[tris(GalNAc-alkyl)-ami dodecanoyl)]-4-hydroxyprolinol
tgttctggtcctttttggtca

SEQ ID NO: 1777 - RNA, 21 nt, synthetic construct
  source 1..21: mol_type = other RNA
  modified_base 1: mod_base = OTHER; note = 2'-O-methylguanosine-3'-phosphorothioate
  modified_base 2: mod_base = OTHER; note = 2'-O-methyluridine-3'-phosphorothioate
  modified_base 3: mod_base = OTHER; note = 2'-O-methyluridine-3'-phosphate
  modified_base 4: mod_base = OTHER; note = 2'-O-methylcytidine-3'-phosphate
  modified_base 5: mod_base = OTHER; note = 2'-O-methyluridine-3'-phosphate
  modified_base 6: mod_base = OTHER; note = 2'-O-methylguanosine-3'-phosphate
  modified_base 7: mod_base = OTHER; note = 2'-fluoroguanosine-3'-phosphate
  modified_base 8: mod_base = OTHER; note = 2'-O-methyluridine-3'-phosphate
  modified_base 9: mod_base = OTHER; note = 2'-fluorocytidine-3'-phosphate
  modified_base 10: mod_base = OTHER; note = 2'-fluorocytidine-3'-phosphate
  modified_base 11: mod_base = OTHER; note = 2'-fluorouridine-3'-phosphate
  modified_base 12: mod_base = OTHER; note = 2'-O-methyluridine-3'-phosphate
  modified_base 13: mod_base = OTHER; note = 2'-O-methyluridine-3'-phosphate
  modified_base 14: mod_base = OTHER; note = 2'-O-methyluridine-3'-phosphate
  modified_base 15: mod_base = OTHER; note = 2'-O-methyluridine-3'-phosphate
  modified_base 16: mod_base = OTHER; note = 2'-O-methylguanosine-3'-phosphate
  modified_base 17: mod_base = OTHER; note = 2'-O-methylguanosine-3'-phosphate
  modified_base 18: mod_base = OTHER; note = 2'-O-methyluridine-3'-phosphate
  modified_base 19: mod_base = OTHER; note = 2'-O-methylcytidine-3'-phosphate
  modified_base 20: mod_base = OTHER; note = 2'-O-methylguanosine-3'-phosphate
  modified_base 21: mod_base = OTHER; note 2'-O-methyladenosine-3'-phosphate-N-[tris(GalNAc-alkyl)-ami dodecanoyl)]-4-hydroxyprolinol
gttctggtcctttttggtcga

SEQ ID NO: 1778 - RNA, 21 nt, synthetic construct
  source 1..21: mol_type = other RNA
  modified_base 1: mod_base = OTHER; note = 2'-O-methyluridine-3'-phosphorothioate
  modified_base 2: mod_base = OTHER; note = 2'-O-methyluridine-3'-phosphorothioate
  modified_base 3: mod_base = OTHER; note = 2'-O-methylcytidine-3'-phosphate
  modified_base 4: mod_base = OTHER; note = 2'-O-methyluridine-3'-phosphate
  modified_base 5: mod_base = OTHER; note = 2'-O-methylguanosine-3'-phosphate
  modified_base 6: mod_base = OTHER; note = 2'-O-methylguanosine-3'-phosphate
  modified_base 7: mod_base = OTHER; note = 2'-fluorouridine-3'-phosphate
  modified_base 8: mod_base = OTHER; note = 2'-O-methylcytidine-3'-phosphate
  modified_base 9: mod_base = OTHER; note = 2'-fluorocytidine-3'-phosphate
  modified_base 10: mod_base = OTHER; note = 2'-fluorouridine-3'-phosphate
  modified_base 11: mod_base = OTHER; note = 2'-fluorouridine-3'-phosphate
  modified_base 12: mod_base = OTHER; note = 2'-O-methyluridine-3'-phosphate
  modified_base 13: mod_base = OTHER; note = 2'-O-methyluridine-3'-phosphate
  modified_base 14: mod_base = OTHER; note = 2'-O-methyluridine-3'-phosphate
  modified_base 15: mod_base = OTHER; note = 2'-O-methylguanosine-3'-phosphate
  modified_base 16: mod_base = OTHER; note = 2'-O-methylguanosine-3'-phosphate
  modified_base 17: mod_base = OTHER; note = 2'-O-methyluridine-3'-phosphate
  modified_base 18: mod_base = OTHER; note = 2'-O-methylcytidine-3'-phosphate
  modified_base 19: mod_base = OTHER; note = 2'-O-methylguanosine-3'-phosphate
  modified_base 20: mod_base = OTHER; note = 2'-O-methyladenosine-3'-phosphate
  modified_base 21: mod_base = OTHER; note 2'-O-methyladenosine-3'-phosphate-N-[tris(GalNAc-alkyl)-ami dodecanoyl)]-4-hydroxyprolinol
ttctggtcctttttggtcgaa

SEQ ID NO: 1779 - RNA, 21 nt, synthetic construct
  source 1..21: mol_type = other RNA
  modified_base 1: mod_base = OTHER; note = 2'-O-methyluridine-3'-phosphorothioate
  modified_base 2: mod_base = OTHER; note = 2'-O-methylcytidine-3'-phosphorothioate
  modified_base 3: mod_base = OTHER; note = 2'-O-methyluridine-3'-phosphate
  modified_base 4: mod_base = OTHER; note = 2'-O-methylguanosine-3'-phosphate
  modified_base 5: mod_base = OTHER; note = 2'-O-methylguanosine-3'-phosphate
  modified_base 6: mod_base = OTHER; note = 2'-O-methyluridine-3'-phosphate
  modified_base 7: mod_base = OTHER; note = 2'-fluorocytidine-3'-phosphate
  modified_base 8: mod_base = OTHER; note = 2'-O-methylcytidine-3'-phosphate
  modified_base 9: mod_base = OTHER; note = 2'-fluorouridine-3'-phosphate
  modified_base 10: mod_base = OTHER; note = 2'-fluorouridine-3'-phosphate
  modified_base 11: mod_base = OTHER; note = 2'-fluorouridine-3'-phosphate
  modified_base 12: mod_base = OTHER; note = 2'-O-methyluridine-3'-phosphate
  modified_base 13: mod_base = OTHER; note = 2'-O-methyluridine-3'-phosphate
  modified_base 14: mod_base = OTHER; note = 2'-O-methylguanosine-3'-phosphate
  modified_base 15: mod_base = OTHER; note = 2'-O-methylguanosine-3'-phosphate
  modified_base 16: mod_base = OTHER; note = 2'-O-methyluridine-3'-phosphate
  modified_base 17: mod_base = OTHER; note = 2'-O-methylcytidine-3'-phosphate
  modified_base 18: mod_base = OTHER; note = 2'-O-methylguanosine-3'-phosphate
  modified_base 19: mod_base = OTHER; note = 2'-O-methyladenosine-3'-phosphate
  modified_base 20: mod_base = OTHER; note = 2'-O-methylguanosine-3'-phosphate
  modified_base 21: mod_base = OTHER; note 2'-O-methyladenosine-3'-phosphate-N-[tris(GalNAc-alkyl)-ami dodecanoyl)]-4-hydroxyprolinol
tctggtcctttttggtcgaga

SEQ ID NO: 1780 - RNA, 21 nt, synthetic construct
  source 1..21: mol_type = other RNA
  modified_base 1: mod_base = OTHER; note = 2'-O-methylcytidine-3'-phosphorothioate
  modified_base 2: mod_base = OTHER; note = 2'-O-methyluridine-3'-phosphorothioate
  modified_base 3: mod_base = OTHER; note = 2'-O-methylguanosine-3'-phosphate
  modified_base 4: mod_base = OTHER; note = 2'-O-methylguanosine-3'-phosphate
  modified_base 5: mod_base = OTHER; note = 2'-O-methyluridine-3'-phosphate
  modified_base 6: mod_base = OTHER; note = 2'-O-methylcytidine-3'-phosphate
  modified_base 7: mod_base = OTHER; note = 2'-fluorocytidine-3'-phosphate
  modified_base 8: mod_base = OTHER; note = 2'-O-methyluridine-3'-phosphate
  modified_base 9: mod_base = OTHER; note = 2'-fluorouridine-3'-phosphate
  modified_base 10: mod_base = OTHER; note = 2'-fluorouridine-3'-phosphate
  modified_base 11: mod_base = OTHER; note = 2'-fluorouridine-3'-phosphate
  modified_base 12: mod_base = OTHER; note = 2'-O-methyluridine-3'-phosphate
  modified_base 13: mod_base = OTHER; note = 2'-O-methylguanosine-3'-phosphate
  modified_base 14: mod_base = OTHER; note = 2'-O-methylguanosine-3'-phosphate
  modified_base 15: mod_base = OTHER; note = 2'-O-methyluridine-3'-phosphate
  modified_base 16: mod_base = OTHER; note = 2'-O-methylcytidine-3'-phosphate
  modified_base 17: mod_base = OTHER; note = 2'-O-methylguanosine-3'-phosphate
  modified_base 18: mod_base = OTHER; note = 2'-O-methyladenosine-3'-phosphate
  modified_base 19: mod_base = OTHER; note = 2'-O-methylguanosine-3'-phosphate
  modified_base 20: mod_base = OTHER; note = 2'-O-methylguanosine-3'-phosphate
  modified_base 21: mod_base = OTHER; note 2'-O-methyladenosine-3'-phosphate-N-[tris(GalNAc-alkyl)-ami dodecanoyl)]-4-hydroxyprolinol
ctggtcctttttggtcgagga

SEQ ID NO: 1781 - RNA, 21 nt, synthetic construct
  source 1..21: mol_type = other RNA
  modified_base 1: mod_base = OTHER; note = 2'-O-methylguanosine-3'-phosphorothioate
  modified_base 2: mod_base = OTHER; note = 2'-O-methyladenosine-3'-phosphorothioate
  modified_base 3: mod_base = OTHER; note = 2'-O-methylguanosine-3'-phosphate
  modified_base 4: mod_base = OTHER; note = 2'-O-methylguanosine-3'-phosphate
  modified_base 5: mod_base = OTHER; note = 2'-O-methyladenosine-3'-phosphate
  modified_base 6: mod_base = OTHER; note = 2'-O-methylguanosine-3'-phosphate
  modified_base 7: mod_base = OTHER; note = 2'-fluorouridine-3'-phosphate
  modified_base 8: mod_base = OTHER; note = 2'-O-methyladenosine-3'-phosphate
  modified_base 9: mod_base = OTHER; note = 2'-fluoroadenosine-3'-phosphate
  modified_base 10: mod_base = OTHER; note = 2'-fluorocytidine-3'-phosphate
  modified_base 11: mod_base = OTHER; note = 2'-fluoroadenosine-3'-phosphate
  modified_base 12: mod_base = OTHER; note = 2'-O-methyladenosine-3'-phosphate
  modified_base 13: mod_base = OTHER; note = 2'-O-methyluridine-3'-phosphate
  modified_base 14: mod_base = OTHER; note = 2'-O-methyladenosine-3'-phosphate
  modified_base 15: mod_base = OTHER; note = 2'-O-methylcytidine-3'-phosphate
  modified_base 16: mod_base = OTHER; note = 2'-O-methyladenosine-3'-phosphate
  modified_base 17: mod_base = OTHER; note = 2'-O-methyladenosine-3'-phosphate
  modified_base 18: mod_base = OTHER; note = 2'-O-methyladenosine-3'-phosphate
  modified_base 19: mod_base = OTHER; note = 2'-O-methyluridine-3'-phosphate
  modified_base 20: mod_base = OTHER; note = 2'-O-methylguanosine-3'-phosphate
  modified_base 21: mod_base = OTHER; note 2'-O-methyladenosine-3'-phosphate-N-[tris(GalNAc-alkyl)-ami dodecanoyl)]-4-hydroxyprolinol
gaggagtaacaatacaaatga

SEQ ID NO: 1782 - RNA, 21 nt, synthetic construct
  source 1..21: mol_type = other RNA
  modified_base 1: mod_base = OTHER; note = 2'-O-methyladenosine-3'-phosphorothioate
  modified_base 2: mod_base = OTHER; note = 2'-O-methyluridine-3'-phosphorothioate
  modified_base 3: mod_base = OTHER; note = 2'-O-methylguanosine-3'-phosphate
  modified_base 4: mod_base = OTHER; note = 2'-O-methylguanosine-3'-phosphate
  modified_base 5: mod_base = OTHER; note = 2'-O-methyluridine-3'-phosphate
  modified_base 6: mod_base = OTHER; note = 2'-O-methylguanosine-3'-phosphate
  modified_base 7: mod_base = OTHER; note = 2'-fluorouridine-3'-phosphate
  modified_base 8: mod_base = OTHER; note = 2'-O-methyladenosine-3'-phosphate
  modified_base 9: mod_base = OTHER; note = 2'-fluoroguanosine-3'-phosphate
  modified_base 10: mod_base = OTHER; note = 2'-fluoroadenosine-3'-phosphate
  modified_base 11: mod_base = OTHER; note = 2'-fluoroadenosine-3'-phosphate
  modified_base 12: mod_base = OTHER; note = 2'-O-methylcytidine-3'-phosphate
  modified_base 13: mod_base = OTHER; note = 2'-O-methyladenosine-3'-phosphate
  modified_base 14: mod_base = OTHER; note = 2'-O-methylcytidine-3'-phosphate
  modified_base 15: mod_base = OTHER; note = 2'-O-methyluridine-3'-phosphate
  modified_base 16: mod_base = OTHER; note = 2'-O-methyladenosine-3'-phosphate
  modified_base 17: mod_base = OTHER; note = 2'-O-methyladenosine-3'-phosphate
  modified_base 18: mod_base = OTHER; note = 2'-O-methyluridine-3'-phosphate
  modified_base 19: mod_base = OTHER; note = 2'-O-methyluridine-3'-phosphate
  modified_base 20: mod_base = OTHER; note = 2'-O-methylcytidine-3'-phosphate
  modified_base 21: mod_base = OTHER; note 2'-O-methyladenosine-3'-phosphate-N-[tris(GalNAc-alkyl)-ami dodecanoyl)]-4-hydroxyprolinol
atggtgtagaacactaattca

SEQ ID NO: 1783 - RNA, 21 nt, synthetic construct
  source 1..21: mol_type = other RNA
  modified_base 1: mod_base = OTHER; note = 2'-O-methylguanosine-3'-phosphorothioate
  modified_base 2: mod_base = OTHER; note = 2'-O-methylguanosine-3'-phosphorothioate
  modified_base 3: mod_base = OTHER; note = 2'-O-methyluridine-3'-phosphate
  modified_base 4: mod_base = OTHER; note = 2'-O-methylguanosine-3'-phosphate
  modified_base 5: mod_base = OTHER; note = 2'-O-methyluridine-3'-phosphate
  modified_base 6: mod_base = OTHER; note = 2'-O-methyladenosine-3'-phosphate
  modified_base 7: mod_base = OTHER; note = 2'-fluoroguanosine-3'-phosphate
  modified_base 8: mod_base = OTHER; note = 2'-O-methyladenosine-3'-phosphate
  modified_base 9: mod_base = OTHER; note = 2'-fluoroadenosine-3'-phosphate
  modified_base 10: mod_base = OTHER; note = 2'-fluorocytidine-3'-phosphate
  modified_base 11: mod_base = OTHER; note = 2'-fluoroadenosine-3'-phosphate
  modified_base 12: mod_base = OTHER; note = 2'-O-methylcytidine-3'-phosphate
  modified_base 13: mod_base = OTHER; note = 2'-O-methyluridine-3'-phosphate
  modified_base 14: mod_base = OTHER; note = 2'-O-methyladenosine-3'-phosphate
  modified_base 15: mod_base = OTHER; note = 2'-O-methyladenosine-3'-phosphate
  modified_base 16: mod_base = OTHER; note = 2'-O-methyluridine-3'-phosphate
  modified_base 17: mod_base = OTHER; note = 2'-O-methyluridine-3'-phosphate
  modified_base 18: mod_base = OTHER; note = 2'-O-methylcytidine-3'-phosphate
  modified_base 19: mod_base = OTHER; note = 2'-O-methyladenosine-3'-phosphate
  modified_base 20: mod_base = OTHER; note = 2'-O-methyluridine-3'-phosphate
  modified_base 21: mod_base = OTHER; note 2'-O-methyladenosine-3'-phosphate-N-[tris(GalNAc-alkyl)-ami dodecanoyl)]-4-hydroxyprolinol
ggtgtagaacactaattcata

SEQ ID NO: 1784 - RNA, 21 nt, synthetic construct
  source 1..21: mol_type = other RNA
  modified_base 1: mod_base = OTHER; note = 2'-O-methylguanosine-3'-phosphorothioate
  modified_base 2: mod_base = OTHER; note = 2'-O-methyluridine-3'-phosphorothioate
  modified_base 3: mod_base = OTHER; note = 2'-O-methylguanosine-3'-phosphate
  modified_base 4: mod_base = OTHER; note = 2'-O-methyluridine-3'-phosphate
  modified_base 5: mod_base = OTHER; note = 2'-O-methyladenosine-3'-phosphate
  modified_base 6: mod_base = OTHER; note = 2'-O-methylguanosine-3'-phosphate
  modified_base 7: mod_base = OTHER; note = 2'-fluoroadenosine-3'-phosphate
  modified_base 8: mod_base = OTHER; note = 2'-O-methyladenosine-3'-phosphate
  modified_base 9: mod_base = OTHER; note = 2'-fluorocytidine-3'-phosphate
  modified_base 10: mod_base = OTHER; note = 2'-fluoroadenosine-3'-phosphate
  modified_base 11: mod_base = OTHER; note = 2'-fluorocytidine-3'-phosphate
  modified_base 12: mod_base = OTHER; note = 2'-O-methyluridine-3'-phosphate
  modified_base 13: mod_base = OTHER; note = 2'-O-methyladenosine-3'-phosphate
  modified_base 14: mod_base = OTHER; note = 2'-O-methyladenosine-3'-phosphate
  modified_base 15: mod_base = OTHER; note = 2'-O-methyluridine-3'-phosphate
  modified_base 16: mod_base = OTHER; note = 2'-O-methyluridine-3'-phosphate
  modified_base 17: mod_base = OTHER; note = 2'-O-methylcytidine-3'-phosphate
  modified_base 18: mod_base = OTHER; note = 2'-O-methyladenosine-3'-phosphate
  modified_base 19: mod_base = OTHER; note = 2'-O-methyluridine-3'-phosphate
  modified_base 20: mod_base = OTHER; note = 2'-O-methyladenosine-3'-phosphate
  modified_base 21: mod_base = OTHER; note 2'-O-methyladenosine-3'-phosphate-N-[tris(GalNAc-alkyl)-ami dodecanoyl)]-4-hydroxyprolinol
gtgtagaacactaattcataa

SEQ ID NO: 1785 - RNA, 21 nt, synthetic construct
  source 1..21: mol_type = other RNA
  modified_base 1: mod_base = OTHER; note = 2'-O-methyluridine-3'-phosphorothioate
  modified_base 2: mod_base = OTHER; note = 2'-O-methyladenosine-3'-phosphorothioate
  modified_base 3: mod_base = OTHER; note = 2'-O-methylguanosine-3'-phosphate
  modified_base 4: mod_base = OTHER; note = 2'-O-methyladenosine-3'-phosphate
  modified_base 5: mod_base = OTHER; note = 2'-O-methyladenosine-3'-phosphate
  modified_base 6: mod_base = OTHER; note = 2'-O-methylcytidine-3'-phosphate
  modified_base 7: mod_base = OTHER; note = 2'-fluoroadenosine-3'-phosphate
  modified_base 8: mod_base = OTHER; note = 2'-O-methylcytidine-3'-phosphate
  modified_base 9: mod_base = OTHER; note = 2'-fluorouridine-3'-phosphate
  modified_base 10: mod_base = OTHER; note = 2'-fluoroadenosine-3'-phosphate
  modified_base 11: mod_base = OTHER; note = 2'-fluoroadenosine-3'-phosphate
  modified_base 12: mod_base = OTHER; note = 2'-O-methyluridine-3'-phosphate
  modified_base 13: mod_base = OTHER; note = 2'-O-methyluridine-3'-phosphate
  modified_base 14: mod_base = OTHER; note = 2'-O-methylcytidine-3'-phosphate
  modified_base 15: mod_base = OTHER; note = 2'-O-methyladenosine-3'-phosphate
  modified_base 16: mod_base = OTHER; note = 2'-O-methyluridine-3'-phosphate
  modified_base 17: mod_base = OTHER; note = 2'-O-methyladenosine-3'-phosphate
  modified_base 18: mod_base = OTHER; note = 2'-O-methyladenosine-3'-phosphate
  modified_base 19: mod_base = OTHER; note = 2'-O-methyluridine-3'-phosphate
  modified_base 20: mod_base = OTHER; note = 2'-O-methylcytidine-3'-phosphate
  modified_base 21: mod_base = OTHER; note 2'-O-methyladenosine-3'-phosphate-N-[tris(GalNAc-alkyl)-ami dodecanoyl)]-4-hydroxyprolinol
tagaacactaattcataatca

SEQ ID NO: 1786 - RNA, 21 nt, synthetic construct
  source 1..21: mol_type = other RNA
  modified_base 1: mod_base = OTHER; note = 2'-O-methylguanosine-3'-phosphorothioate
  modified_base 2: mod_base = OTHER; note = 2'-O-methyladenosine-3'-phosphorothioate
  modified_base 3: mod_base = OTHER; note = 2'-O-methyladenosine-3'-phosphate
  modified_base 4: mod_base = OTHER; note = 2'-O-methylcytidine-3'-phosphate
  modified_base 5: mod_base = OTHER; note = 2'-O-methyladenosine-3'-phosphate
  modified_base 6: mod_base = OTHER; note = 2'-O-methylcytidine-3'-phosphate
  modified_base 7: mod_base = OTHER; note = 2'-fluorouridine-3'-phosphate
  modified_base 8: mod_base = OTHER; note = 2'-O-methyladenosine-3'-phosphate
  modified_base 9: mod_base = OTHER; note = 2'-fluoroadenosine-3'-phosphate
  modified_base 10: mod_base = OTHER; note = 2'-fluorouridine-3'-phosphate
  modified_base 11: mod_base = OTHER; note = 2'-fluorouridine-3'-phosphate
  modified_base 12: mod_base = OTHER; note = 2'-O-methylcytidine-3'-phosphate
  modified_base 13: mod_base = OTHER; note = 2'-O-methyladenosine-3'-phosphate
  modified_base 14: mod_base = OTHER; note = 2'-O-methyluridine-3'-phosphate
  modified_base 15: mod_base = OTHER; note = 2'-O-methyladenosine-3'-phosphate
  modified_base 16: mod_base = OTHER; note = 2'-O-methyladenosine-3'-phosphate
  modified_base 17: mod_base = OTHER; note = 2'-O-methyluridine-3'-phosphate
  modified_base 18: mod_base = OTHER; note = 2'-O-methylcytidine-3'-phosphate
  modified_base 19: mod_base = OTHER; note = 2'-O-methyladenosine-3'-phosphate
  modified_base 20: mod_base = OTHER; note = 2'-O-methylcytidine-3'-phosphate
  modified_base 21: mod_base = OTHER; note 2'-O-methyladenosine-3'-phosphate-N-[tris(GalNAc-alkyl)-ami dodecanoyl)]-4-hydroxyprolinol
gaacactaattcataatcaca

SEQ ID NO: 1787 - RNA, 21 nt, synthetic construct
  source 1..21: mol_type = other RNA
  modified_base 1: mod_base = OTHER; note = 2'-O-methyluridine-3'-phosphorothioate
  modified_base 2: mod_base = OTHER; note = 2'-O-methylguanosine-3'-phosphorothioate
  modified_base 3: mod_base = OTHER; note = 2'-O-methylcytidine-3'-phosphate
  modified_base 4: mod_base = OTHER; note = 2'-O-methyluridine-3'-phosphate
  modified_base 5: mod_base = OTHER; note = 2'-O-methyluridine-3'-phosphate
  modified_base 6: mod_base = OTHER; note = 2'-O-methyladenosine-3'-phosphate
  modified_base 7: mod_base = OTHER; note = 2'-fluoroadenosine-3'-phosphate
  modified_base 8: mod_base = OTHER; note = 2'-O-methyladenosine-3'-phosphate
  modified_base 9: mod_base = OTHER; note = 2'-fluoroadenosine-3'-phosphate
  modified_base 10: mod_base = OTHER; note = 2'-fluorouridine-3'-phosphate
  modified_base 11: mod_base = OTHER; note = 2'-fluoroadenosine-3'-phosphate
  modified_base 12: mod_base = OTHER; note = 2'-O-methyladenosine-3'-phosphate
  modified_base 13: mod_base = OTHER; note = 2'-O-methylguanosine-3'-phosphate
  modified_base 14: mod_base = OTHER; note = 2'-O-methylcytidine-3'-phosphate
  modified_base 15: mod_base = OTHER; note = 2'-O-methyladenosine-3'-phosphate
  modified_base 16: mod_base = OTHER; note = 2'-O-methylguanosine-3'-phosphate
  modified_base 17: mod_base = OTHER; note = 2'-O-methylguanosine-3'-phosphate
  modified_base 18: mod_base = OTHER; note = 2'-O-methyluridine-3'-phosphate
  modified_base 19: mod_base = OTHER; note = 2'-O-methylguanosine-3'-phosphate
  modified_base 20: mod_base = OTHER; note = 2'-O-methylguanosine-3'-phosphate
  modified_base 21: mod_base = OTHER; note 2'-O-methyladenosine-3'-phosphate-N-[tris(GalNAc-alkyl)-ami dodecanoyl)]-4-hydroxyprolinol
tgcttaaaataagcaggtgga

SEQ ID NO: 1788 - RNA, 21 nt, synthetic construct
  source 1..21: mol_type = other RNA
  modified_base 1: mod_base = OTHER; note = 2'-O-methyluridine-3'-phosphorothioate
  modified_base 2: mod_base = OTHER; note = 2'-O-methyladenosine-3'-phosphorothioate
  modified_base 3: mod_base = OTHER; note = 2'-O-methyladenosine-3'-phosphate
  modified_base 4: mod_base = OTHER; note = 2'-O-methylguanosine-3'-phosphate
  modified_base 5: mod_base = OTHER; note = 2'-O-methylcytidine-3'-phosphate
  modified_base 6: mod_base = OTHER; note = 2'-O-methyladenosine-3'-phosphate
  modified_base 7: mod_base = OTHER; note = 2'-fluoroguanosine-3'-phosphate
  modified_base 8: mod_base = OTHER; note = 2'-O-methylguanosine-3'-phosphate
  modified_base 9: mod_base = OTHER; note = 2'-fluorouridine-3'-phosphate
  modified_base 10: mod_base = OTHER; note = 2'-fluoroguanosine-3'-phosphate
  modified_base 11: mod_base = OTHER; note = 2'-fluoroguanosine-3'-phosphate
  modified_base 12: mod_base = OTHER; note = 2'-O-methyladenosine-3'-phosphate
  modified_base 13: mod_base = OTHER; note = 2'-O-methyluridine-3'-phosphate
  modified_base 14: mod_base = OTHER; note = 2'-O-methylcytidine-3'-phosphate
  modified_base 15: mod_base = OTHER; note = 2'-O-methyluridine-3'-phosphate
  modified_base 16: mod_base = OTHER; note = 2'-O-methyladenosine-3'-phosphate
  modified_base 17: mod_base = OTHER; note = 2'-O-methyluridine-3'-phosphate
  modified_base 18: mod_base = OTHER; note = 2'-O-methyluridine-3'-phosphate
  modified_base 19: mod_base = OTHER; note = 2'-O-methyluridine-3'-phosphate
  modified_base 20: mod_base = OTHER; note = 2'-O-methylcytidine-3'-phosphate
  modified_base 21: mod_base = OTHER; note 2'-O-methyladenosine-3'-phosphate-N-[tris(GalNAc-alkyl)-ami dodecanoyl)]-4-hydroxyprolinol
taagcaggtggatctatttca

SEQ ID NO: 1789 - RNA, 21 nt, synthetic construct
  source 1..21: mol_type = other RNA
  modified_base 1: mod_base = OTHER; note = 2'-O-methyladenosine-3'-phosphorothioate
  modified_base 2: mod_base = OTHER; note = 2'-O-methylguanosine-3'-phosphorothioate
  modified_base 3: mod_base = OTHER; note = 2'-O-methylcytidine-3'-phosphate
  modified_base 4: mod_base = OTHER; note = 2'-O-methyladenosine-3'-phosphate
  modified_base 5: mod_base = OTHER; note = 2'-O-methylguanosine-3'-phosphate
  modified_base 6: mod_base = OTHER; note = 2'-O-methylguanosine-3'-phosphate
  modified_base 7: mod_base = OTHER; note = 2'-fluorouridine-3'-phosphate
  modified_base 8: mod_base = OTHER; note = 2'-O-methylguanosine-3'-phosphate
  modified_base 9: mod_base = OTHER; note = 2'-fluoroguanosine-3'-phosphate
  modified_base 10: mod_base = OTHER; note = 2'-fluoroadenosine-3'-phosphate
  modified_base 11: mod_base = OTHER; note = 2'-fluorouridine-3'-phosphate
  modified_base 12: mod_base = OTHER; note = 2'-O-methylcytidine-3'-phosphate
  modified_base 13: mod_base = OTHER; note = 2'-O-methyluridine-3'-phosphate
  modified_base 14: mod_base = OTHER; note = 2'-O-methyladenosine-3'-phosphate
  modified_base 15: mod_base = OTHER; note = 2'-O-methyluridine-3'-phosphate
  modified_base 16: mod_base = OTHER; note = 2'-O-methyluridine-3'-phosphate
  modified_base 17: mod_base = OTHER; note = 2'-O-methyluridine-3'-phosphate
  modified_base 18: mod_base = OTHER; note = 2'-O-methylcytidine-3'-phosphate
  modified_base 19: mod_base = OTHER; note = 2'-O-methyladenosine-3'-phosphate
  modified_base 20: mod_base = OTHER; note = 2'-O-methyluridine-3'-phosphate
  modified_base 21: mod_base = OTHER; note 2'-O-methyladenosine-3'-phosphate-N-[tris(GalNAc-alkyl)-ami dodecanoyl)]-4-hydroxyprolinol
agcaggtggatctatttcata

SEQ ID NO: 1790 - RNA, 21 nt, synthetic construct
  source 1..21: mol_type = other RNA
  modified_base 1: mod_base = OTHER; note = 2'-O-methylguanosine-3'-phosphorothioate
  modified_base 2: mod_base = OTHER; note = 2'-O-methylcytidine-3'-phosphorothioate
  modified_base 3: mod_base = OTHER; note = 2'-O-methyladenosine-3'-phosphate
  modified_base 4: mod_base = OTHER; note = 2'-O-methylguanosine-3'-phosphate
  modified_base 5: mod_base = OTHER; note = 2'-O-methylguanosine-3'-phosphate
  modified_base 6: mod_base = OTHER; note = 2'-O-methyluridine-3'-phosphate
  modified_base 7: mod_base = OTHER; note = 2'-fluoroguanosine-3'-phosphate
  modified_base 8: mod_base = OTHER; note = 2'-O-methylguanosine-3'-phosphate
  modified_base 9: mod_base = OTHER; note = 2'-fluoroadenosine-3'-phosphate
  modified_base 10: mod_base = OTHER; note = 2'-fluorouridine-3'-phosphate
  modified_base 11: mod_base = OTHER; note = 2'-fluorocytidine-3'-phosphate
  modified_base 12: mod_base = OTHER; note = 2'-O-methyluridine-3'-phosphate
  modified_base 13: mod_base = OTHER; note = 2'-O-methyladenosine-3'-phosphate
  modified_base 14: mod_base = OTHER; note = 2'-O-methyluridine-3'-phosphate
  modified_base 15: mod_base = OTHER; note = 2'-O-methyluridine-3'-phosphate
  modified_base 16: mod_base = OTHER; note = 2'-O-methyluridine-3'-phosphate
  modified_base 17: mod_base = OTHER; note = 2'-O-methylcytidine-3'-phosphate
  modified_base 18: mod_base = OTHER; note = 2'-O-methyladenosine-3'-phosphate
  modified_base 19: mod_base = OTHER; note = 2'-O-methyluridine-3'-phosphate
  modified_base 20: mod_base = OTHER; note = 2'-O-methylguanosine-3'-phosphate
  modified_base 21: mod_base = OTHER; note 2'-O-methyladenosine-3'-phosphate-N-[tris(GalNAc-alkyl)-ami dodecanoyl)]-4-hydroxyprolinol
gcaggtggatctatttcatga

SEQ ID NO: 1791 - RNA, 21 nt, synthetic construct
  source 1..21: mol_type = other RNA
  modified_base 1: mod_base = OTHER; note = 2'-O-methylguanosine-3'-phosphorothioate
  modified_base 2: mod_base = OTHER; note = 2'-O-methylguanosine-3'-phosphorothioate
  modified_base 3: mod_base = OTHER; note = 2'-O-methyluridine-3'-phosphate
  modified_base 4: mod_base = OTHER; note = 2'-O-methylguanosine-3'-phosphate
  modified_base 5: mod_base = OTHER; note = 2'-O-methylguanosine-3'-phosphate
  modified_base 6: mod_base = OTHER; note = 2'-O-methyladenosine-3'-phosphate
  modified_base 7: mod_base = OTHER; note = 2'-fluorouridine-3'-phosphate
  modified_base 8: mod_base = OTHER; note = 2'-O-methylcytidine-3'-phosphate
  modified_base 9: mod_base = OTHER; note = 2'-fluorouridine-3'-phosphate
  modified_base 10: mod_base = OTHER; note = 2'-fluoroadenosine-3'-phosphate
  modified_base 11: mod_base = OTHER; note = 2'-fluorouridine-3'-phosphate
  modified_base 12: mod_base = OTHER; note = 2'-O-methyluridine-3'-phosphate
  modified_base 13: mod_base = OTHER; note = 2'-O-methyluridine-3'-phosphate
  modified_base 14: mod_base = OTHER; note = 2'-O-methylcytidine-3'-phosphate
  modified_base 15: mod_base = OTHER; note = 2'-O-methyladenosine-3'-phosphate
  modified_base 16: mod_base = OTHER; note = 2'-O-methyluridine-3'-phosphate
  modified_base 17: mod_base = OTHER; note = 2'-O-methylguanosine-3'-phosphate
  modified_base 18: mod_base = OTHER; note = 2'-O-methyluridine-3'-phosphate
  modified_base 19: mod_base = OTHER; note = 2'-O-methyluridine-3'-phosphate
  modified_base 20: mod_base = OTHER; note = 2'-O-methyluridine-3'-phosphate
  modified_base 21: mod_base = OTHER; note 2'-O-methyladenosine-3'-phosphate-N-[tris(GalNAc-alkyl)-ami dodecanoyl)]-4-hydroxyprolinol
ggtggatctatttcatgttta

SEQ ID NO: 1792 - RNA, 21 nt, synthetic construct
  source 1..21: mol_type = other RNA
  modified_base 1: mod_base = OTHER; note = 2'-O-methylguanosine-3'-phosphorothioate
  modified_base 2: mod_base = OTHER; note = 2'-O-methyluridine-3'-phosphorothioate
  modified_base 3: mod_base = OTHER; note = 2'-O-methylguanosine-3'-phosphate
  modified_base 4: mod_base = OTHER; note = 2'-O-methylguanosine-3'-phosphate
  modified_base 5: mod_base = OTHER; note = 2'-O-methyladenosine-3'-phosphate
  modified_base 6: mod_base = OTHER; note = 2'-O-methyluridine-3'-phosphate
  modified_base 7: mod_base = OTHER; note = 2'-fluorocytidine-3'-phosphate
  modified_base 8: mod_base = OTHER; note = 2'-O-methyluridine-3'-phosphate
  modified_base 9: mod_base = OTHER; note = 2'-fluoroadenosine-3'-phosphate
  modified_base 10: mod_base = OTHER; note = 2'-fluorouridine-3'-phosphate
  modified_base 11: mod_base = OTHER; note = 2'-fluorouridine-3'-phosphate
  modified_base 12: mod_base = OTHER; note = 2'-O-methyluridine-3'-phosphate
  modified_base 13: mod_base = OTHER; note = 2'-O-methylcytidine-3'-phosphate
  modified_base 14: mod_base = OTHER; note = 2'-O-methyladenosine-3'-phosphate
  modified_base 15: mod_base = OTHER; note = 2'-O-methyluridine-3'-phosphate
  modified_base 16: mod_base = OTHER; note = 2'-O-methylguanosine-3'-phosphate
  modified_base 17: mod_base = OTHER; note = 2'-O-methyluridine-3'-phosphate
  modified_base 18: mod_base = OTHER; note = 2'-O-methyluridine-3'-phosphate
  modified_base 19: mod_base = OTHER; note = 2'-O-methyluridine-3'-phosphate
  modified_base 20: mod_base = OTHER; note = 2'-O-methyluridine-3'-phosphate
  modified_base 21: mod_base = OTHER; note 2'-O-methyladenosine-3'-phosphate-N-[tris(GalNAc-alkyl)-ami dodecanoyl)]-4-hydroxyprolinol
gtggatctatttcatgtttta

SEQ ID NO: 1793 - RNA, 21 nt, synthetic construct
  source 1..21: mol_type = other RNA
  modified_base 1: mod_base = OTHER; note = 2'-O-methylguanosine-3'-phosphorothioate
  modified_base 2: mod_base = OTHER; note = 2'-O-methylguanosine-3'-phosphorothioate
  modified_base 3: mod_base = OTHER; note = 2'-O-methyladenosine-3'-phosphate
  modified_base 4: mod_base = OTHER; note = 2'-O-methyluridine-3'-phosphate
  modified_base 5: mod_base = OTHER; note = 2'-O-methylcytidine-3'-phosphate
  modified_base 6: mod_base = OTHER; note = 2'-O-methyluridine-3'-phosphate
  modified_base 7: mod_base = OTHER; note = 2'-fluoroadenosine-3'-phosphate
  modified_base 8: mod_base = OTHER; note = 2'-O-methyluridine-3'-phosphate
  modified_base 9: mod_base = OTHER; note = 2'-fluorouridine-3'-phosphate
  modified_base 10: mod_base = OTHER; note = 2'-fluorouridine-3'-phosphate
  modified_base 11: mod_base = OTHER; note = 2'-fluorocytidine-3'-phosphate
  modified_base 12: mod_base = OTHER; note = 2'-O-methyladenosine-3'-phosphate
  modified_base 13: mod_base = OTHER; note = 2'-O-methyluridine-3'-phosphate
  modified_base 14: mod_base = OTHER; note = 2'-O-methylguanosine-3'-phosphate
  modified_base 15: mod_base = OTHER; note = 2'-O-methyluridine-3'-phosphate
  modified_base 16: mod_base = OTHER; note = 2'-O-methyluridine-3'-phosphate
  modified_base 17: mod_base = OTHER; note = 2'-O-methyluridine-3'-phosphate
  modified_base 18: mod_base = OTHER; note = 2'-O-methyluridine-3'-phosphate
  modified_base 19: mod_base = OTHER; note = 2'-O-methyluridine-3'-phosphate
  modified_base 20: mod_base = OTHER; note = 2'-O-methylguanosine-3'-phosphate
  modified_base 21: mod_base = OTHER; note 2'-O-methyladenosine-3'-phosphate-N-[tris(GalNAc-alkyl)-ami dodecanoyl)]-4-hydroxyprolinol
ggatctatttcatgtttttga

SEQ ID NO: 1794 - RNA, 21 nt, synthetic construct
  source 1..21: mol_type = other RNA
  modified_base 1: mod_base = OTHER; note = 2'-O-methylguanosine-3'-phosphorothioate
  modified_base 2: mod_base = OTHER; note = 2'-O-methylguanosine-3'-phosphorothioate
  modified_base 3: mod_base = OTHER; note = 2'-O-methylguanosine-3'-phosphate
  modified_base 4: mod_base = OTHER; note = 2'-O-methyluridine-3'-phosphate
  modified_base 5: mod_base = OTHER; note = 2'-O-methyladenosine-3'-phosphate
  modified_base 6: mod_base = OTHER; note = 2'-O-methylguanosine-3'-phosphate
  modified_base 7: mod_base = OTHER; note = 2'-fluoroguanosine-3'-phosphate
  modified_base 8: mod_base = OTHER; note = 2'-O-methylguanosine-3'-phosphate
  modified_base 9: mod_base = OTHER; note = 2'-fluorouridine-3'-phosphate
  modified_base 10: mod_base = OTHER; note = 2'-fluoroadenosine-3'-phosphate
  modified_base 11: mod_base = OTHER; note = 2'-fluoroadenosine-3'-phosphate
  modified_base 12: mod_base = OTHER; note = 2'-O-methyladenosine-3'-phosphate
  modified_base 13: mod_base = OTHER; note = 2'-O-methyluridine-3'-phosphate
  modified_base 14: mod_base = OTHER; note = 2'-O-methylcytidine-3'-phosphate
  modified_base 15: mod_base = OTHER; note = 2'-O-methyladenosine-3'-phosphate
  modified_base 16: mod_base = OTHER; note = 2'-O-methylguanosine-3'-phosphate
  modified_base 17: mod_base = OTHER; note = 2'-O-methyluridine-3'-phosphate
  modified_base 18: mod_base = OTHER; note = 2'-O-methyladenosine-3'-phosphate
  modified_base 19: mod_base = OTHER; note = 2'-O-methyladenosine-3'-phosphate
  modified_base 20: mod_base = OTHER; note = 2'-O-methylguanosine-3'-phosphate
  modified_base 21: mod_base = OTHER; note 2'-O-methyladenosine-3'-phosphate-N-[tris(GalNAc-alkyl)-ami dodecanoyl)]-4-hydroxyprolinol
gggtagggtaaatcagtaaga

SEQ ID NO: 1795 - RNA, 21 nt, synthetic construct
  source 1..21: mol_type = other RNA
  modified_base 1: mod_base = OTHER; note = 2'-O-methylguanosine-3'-phosphorothioate
  modified_base 2: mod_base = OTHER; note = 2'-O-methyluridine-3'-phosphorothioate
  modified_base 3: mod_base = OTHER; note = 2'-O-methyladenosine-3'-phosphate
  modified_base 4: mod_base = OTHER; note = 2'-O-methylguanosine-3'-phosphate
  modified_base 5: mod_base = OTHER; note = 2'-O-methylguanosine-3'-phosphate
  modified_base 6: mod_base = OTHER; note = 2'-O-methylguanosine-3'-phosphate
  modified_base 7: mod_base = OTHER; note = 2'-fluorouridine-3'-phosphate
  modified_base 8: mod_base = OTHER; note = 2'-O-methyladenosine-3'-phosphate
  modified_base 9: mod_base = OTHER; note = 2'-fluoroadenosine-3'-phosphate
  modified_base 10: mod_base = OTHER; note = 2'-fluoroadenosine-3'-phosphate
  modified_base 11: mod_base = OTHER; note = 2'-fluorouridine-3'-phosphate
  modified_base 12: mod_base = OTHER; note = 2'-O-methylcytidine-3'-phosphate
  modified_base 13: mod_base = OTHER; note = 2'-O-methyladenosine-3'-phosphate
  modified_base 14: mod_base = OTHER; note = 2'-O-methylguanosine-3'-phosphate
  modified_base 15: mod_base = OTHER; note = 2'-O-methyluridine-3'-phosphate
  modified_base 16: mod_base = OTHER; note = 2'-O-methyladenosine-3'-phosphate
  modified_base 17: mod_base = OTHER; note = 2'-O-methyladenosine-3'-phosphate
  modified_base 18: mod_base = OTHER; note = 2'-O-methylguanosine-3'-phosphate
  modified_base 19: mod_base = OTHER; note = 2'-O-methyladenosine-3'-phosphate
  modified_base 20: mod_base = OTHER; note = 2'-O-methylguanosine-3'-phosphate
  modified_base 21: mod_base = OTHER; note 2'-O-methyladenosine-3'-phosphate-N-[tris(GalNAc-alkyl)-ami dodecanoyl)]-4-hydroxyprolinol
gtagggtaaatcagtaagaga

SEQ ID NO: 1796 - RNA, 21 nt, synthetic construct
  source 1..21: mol_type = other RNA
  modified_base 1: mod_base = OTHER; note = 2'-O-methyluridine-3'-phosphorothioate
  modified_base 2: mod_base = OTHER; note = 2'-O-methyladenosine-3'-phosphorothioate
  modified_base 3: mod_base = OTHER; note = 2'-O-methylguanosine-3'-phosphate
  modified_base 4: mod_base = OTHER; note = 2'-O-methylguanosine-3'-phosphate
  modified_base 5: mod_base = OTHER; note = 2'-O-methylguanosine-3'-phosphate
  modified_base 6: mod_base = OTHER; note = 2'-O-methyluridine-3'-phosphate
  modified_base 7: mod_base = OTHER; note = 2'-fluoroadenosine-3'-phosphate
  modified_base 8: mod_base = OTHER; note = 2'-O-methyladenosine-3'-phosphate
  modified_base 9: mod_base = OTHER; note = 2'-fluoroadenosine-3'-phosphate
  modified_base 10: mod_base = OTHER; note = 2'-fluorouridine-3'-phosphate
  modified_base 11: mod_base = OTHER; note = 2'-fluorocytidine-3'-phosphate
  modified_base 12: mod_base = OTHER; note = 2'-O-methyladenosine-3'-phosphate
  modified_base 13: mod_base = OTHER; note = 2'-O-methylguanosine-3'-phosphate
  modified_base 14: mod_base = OTHER; note = 2'-O-methyluridine-3'-phosphate
  modified_base 15: mod_base = OTHER; note = 2'-O-methyladenosine-3'-phosphate
  modified_base 16: mod_base = OTHER; note = 2'-O-methyladenosine-3'-phosphate
  modified_base 17: mod_base = OTHER; note = 2'-O-methylguanosine-3'-phosphate
  modified_base 18: mod_base = OTHER; note = 2'-O-methyladenosine-3'-phosphate
  modified_base 19: mod_base = OTHER; note = 2'-O-methylguanosine-3'-phosphate
  modified_base 20: mod_base = OTHER; note = 2'-O-methylguanosine-3'-phosphate
  modified_base 21: mod_base = OTHER; note 2'-O-methyladenosine-3'-phosphate-N-[tris(GalNAc-alkyl)-ami dodecanoyl)]-4-hydroxyprolinol
tagggtaaatcagtaagagga

SEQ ID NO: 1797 - RNA, 21 nt, synthetic construct
  source 1..21: mol_type = other RNA
  modified_base 1: mod_base = OTHER; note = 2'-O-methyladenosine-3'-phosphorothioate
  modified_base 2: mod_base = OTHER; note = 2'-O-methylguanosine-3'-phosphorothioate
  modified_base 3: mod_base = OTHER; note = 2'-O-methylguanosine-3'-phosphate
  modified_base 4: mod_base = OTHER; note = 2'-O-methylguanosine-3'-phosphate
  modified_base 5: mod_base = OTHER; note = 2'-O-methyluridine-3'-phosphate
  modified_base 6: mod_base = OTHER; note = 2'-O-methyladenosine-3'-phosphate
  modified_base 7: mod_base = OTHER; note = 2'-fluoroadenosine-3'-phosphate
  modified_base 8: mod_base = OTHER; note = 2'-O-methyladenosine-3'-phosphate
  modified_base 9: mod_base = OTHER; note = 2'-fluorouridine-3'-phosphate
  modified_base 10: mod_base = OTHER; note = 2'-fluorocytidine-3'-phosphate
  modified_base 11: mod_base = OTHER; note = 2'-fluoroadenosine-3'-phosphate
  modified_base 12: mod_base = OTHER; note = 2'-O-methylguanosine-3'-phosphate
  modified_base 13: mod_base = OTHER; note = 2'-O-methyluridine-3'-phosphate
  modified_base 14: mod_base = OTHER; note = 2'-O-methyladenosine-3'-phosphate
  modified_base 15: mod_base = OTHER; note = 2'-O-methyladenosine-3'-phosphate
  modified_base 16: mod_base = OTHER; note = 2'-O-methylguanosine-3'-phosphate
  modified_base 17: mod_base = OTHER; note = 2'-O-methyladenosine-3'-phosphate
  modified_base 18: mod_base = OTHER; note = 2'-O-methylguanosine-3'-phosphate
  modified_base 19: mod_base = OTHER; note = 2'-O-methylguanosine-3'-phosphate
  modified_base 20: mod_base = OTHER; note = 2'-O-methyluridine-3'-phosphate
  modified_base 21: mod_base = OTHER; note 2'-O-methyladenosine-3'-phosphate-N-[tris(GalNAc-alkyl)-ami dodecanoyl)]-4-hydroxyprolinol
agggtaaatcagtaagaggta

SEQ ID NO: 1798 - RNA, 21 nt, synthetic construct
  source 1..21: mol_type = other RNA
  modified_base 1: mod_base = OTHER; note = 2'-O-methylguanosine-3'-phosphorothioate
  modified_base 2: mod_base = OTHER; note = 2'-O-methylguanosine-3'-phosphorothioate
  modified_base 3: mod_base = OTHER; note = 2'-O-methyluridine-3'-phosphate
  modified_base 4: mod_base = OTHER; note = 2'-O-methyladenosine-3'-phosphate
  modified_base 5: mod_base = OTHER; note = 2'-O-methyladenosine-3'-phosphate
  modified_base 6: mod_base = OTHER; note = 2'-O-methyladenosine-3'-phosphate
  modified_base 7: mod_base = OTHER; note = 2'-fluorouridine-3'-phosphate
  modified_base 8: mod_base = OTHER; note = 2'-O-methylcytidine-3'-phosphate
  modified_base 9: mod_base = OTHER; note = 2'-fluoroadenosine-3'-phosphate
  modified_base 10: mod_base = OTHER; note = 2'-fluoroguanosine-3'-phosphate
  modified_base 11: mod_base = OTHER; note = 2'-fluorouridine-3'-phosphate
  modified_base 12: mod_base = OTHER; note = 2'-O-methyladenosine-3'-phosphate
  modified_base 13: mod_base = OTHER; note = 2'-O-methyladenosine-3'-phosphate
  modified_base 14: mod_base = OTHER; note = 2'-O-methylguanosine-3'-phosphate
  modified_base 15: mod_base = OTHER; note = 2'-O-methyladenosine-3'-phosphate
  modified_base 16: mod_base = OTHER; note = 2'-O-methylguanosine-3'-phosphate
  modified_base 17: mod_base = OTHER; note = 2'-O-methylguanosine-3'-phosphate
  modified_base 18: mod_base = OTHER; note = 2'-O-methyluridine-3'-phosphate
  modified_base 19: mod_base = OTHER; note = 2'-O-methylguanosine-3'-phosphate
  modified_base 20: mod_base = OTHER; note = 2'-O-methyluridine-3'-phosphate
  modified_base 21: mod_base = OTHER; note 2'-O-methyladenosine-3'-phosphate-N-[tris(GalNAc-alkyl)-ami dodecanoyl)]-4-hydroxyprolinol
ggtaaatcagtaagaggtgta

SEQ ID NO: 1799 - RNA, 21 nt, synthetic construct
  source 1..21: mol_type = other RNA
  modified_base 1: mod_base = OTHER; note = 2'-O-methylguanosine-3'-phosphorothioate
  modified_base 2: mod_base = OTHER; note = 2'-O-methyluridine-3'-phosphorothioate
  modified_base 3: mod_base = OTHER; note = 2'-O-methyladenosine-3'-phosphate
  modified_base 4: mod_base = OTHER; note = 2'-O-methyladenosine-3'-phosphate
  modified_base 5: mod_base = OTHER; note = 2'-O-methyladenosine-3'-phosphate
  modified_base 6: mod_base = OTHER; note = 2'-O-methyluridine-3'-phosphate
  modified_base 7: mod_base = OTHER; note = 2'-fluorocytidine-3'-phosphate
  modified_base 8: mod_base = OTHER; note = 2'-O-methyladenosine-3'-phosphate
  modified_base 9: mod_base = OTHER; note = 2'-fluoroguanosine-3'-phosphate
  modified_base 10: mod_base = OTHER; note = 2'-fluorouridine-3'-phosphate
  modified_base 11: mod_base = OTHER; note = 2'-fluoroadenosine-3'-phosphate
  modified_base 12: mod_base = OTHER; note = 2'-O-methyladenosine-3'-phosphate
  modified_base 13: mod_base = OTHER; note = 2'-O-methylguanosine-3'-phosphate
  modified_base 14: mod_base = OTHER; note = 2'-O-methyladenosine-3'-phosphate
  modified_base 15: mod_base = OTHER; note = 2'-O-methylguanosine-3'-phosphate
  modified_base 16: mod_base = OTHER; note = 2'-O-methylguanosine-3'-phosphate
  modified_base 17: mod_base = OTHER; note = 2'-O-methyluridine-3'-phosphate
  modified_base 18: mod_base = OTHER; note = 2'-O-methylguanosine-3'-phosphate
  modified_base 19: mod_base = OTHER; note = 2'-O-methyluridine-3'-phosphate
  modified_base 20: mod_base = OTHER; note = 2'-O-methyluridine-3'-phosphate
  modified_base 21: mod_base = OTHER; note 2'-O-methyladenosine-3'-phosphate-N-[tris(GalNAc-alkyl)-ami dodecanoyl)]-4-hydroxyprolinol
gtaaatcagtaagaggtgtta

SEQ ID NO: 1800 - RNA, 21 nt, synthetic construct
  source 1..21: mol_type = other RNA
  modified_base 1: mod_base = OTHER; note = 2'-O-methyluridine-3'-phosphorothioate
  modified_base 2: mod_base = OTHER; note = 2'-O-methyluridine-3'-phosphorothioate
  modified_base 3: mod_base = OTHER; note = 2'-O-methyladenosine-3'-phosphate
  modified_base 4: mod_base = OTHER; note = 2'-O-methylcytidine-3'-phosphate
  modified_base 5: mod_base = OTHER; note = 2'-O-methylcytidine-3'-phosphate
  modified_base 6: mod_base = OTHER; note = 2'-O-methyladenosine-3'-phosphate
  modified_base 7: mod_base = OTHER; note = 2'-fluoroguanosine-3'-phosphate
  modified_base 8: mod_base = OTHER; note = 2'-O-methyluridine-3'-phosphate
  modified_base 9: mod_base = OTHER; note = 2'-fluorouridine-3'-phosphate
  modified_base 10: mod_base = OTHER; note = 2'-fluoroguanosine-3'-phosphate
  modified_base 11: mod_base = OTHER; note = 2'-fluorocytidine-3'-phosphate
  modified_base 12: mod_base = OTHER; note = 2'-O-methylcytidine-3'-phosphate
  modified_base 13: mod_base = OTHER; note = 2'-O-methyluridine-3'-phosphate
  modified_base 14: mod_base = OTHER; note = 2'-O-methyluridine-3'-phosphate
  modified_base 15: mod_base = OTHER; note = 2'-O-methyluridine-3'-phosphate
  modified_base 16: mod_base = OTHER; note = 2'-O-methyluridine-3'-phosphate
  modified_base 17: mod_base = OTHER; note = 2'-O-methyladenosine-3'-phosphate
  modified_base 18: mod_base = OTHER; note = 2'-O-methyluridine-3'-phosphate
  modified_base 19: mod_base = OTHER; note = 2'-O-methylcytidine-3'-phosphate
  modified_base 20: mod_base = OTHER; note = 2'-O-methylcytidine-3'-phosphate
  modified_base 21: mod_base = OTHER; note 2'-O-methyladenosine-3'-phosphate-N-[tris(GalNAc-alkyl)-ami dodecanoyl)]-4-hydroxyprolinol
ttaccagttgccttttatcca

SEQ ID NO: 1801 - RNA, 21 nt, synthetic construct
  source 1..21: mol_type = other RNA
  modified_base 1: mod_base = OTHER; note = 2'-O-methyluridine-3'-phosphorothioate
  modified_base 2: mod_base = OTHER; note = 2'-O-methyladenosine-3'-phosphorothioate
  modified_base 3: mod_base = OTHER; note = 2'-O-methylcytidine-3'-phosphate
  modified_base 4: mod_base = OTHER; note = 2'-O-methylcytidine-3'-phosphate
  modified_base 5: mod_base = OTHER; note = 2'-O-methyladenosine-3'-phosphate
  modified_base 6: mod_base = OTHER; note = 2'-O-methylguanosine-3'-phosphate
  modified_base 7: mod_base = OTHER; note = 2'-fluorouridine-3'-phosphate
  modified_base 8: mod_base = OTHER; note = 2'-O-methyluridine-3'-phosphate
  modified_base 9: mod_base = OTHER; note = 2'-fluoroguanosine-3'-phosphate
  modified_base 10: mod_base = OTHER; note = 2'-fluorocytidine-3'-phosphate
  modified_base 11: mod_base = OTHER; note = 2'-fluorocytidine-3'-phosphate
  modified_base 12: mod_base = OTHER; note = 2'-O-methyluridine-3'-phosphate
  modified_base 13: mod_base = OTHER; note = 2'-O-methyluridine-3'-phosphate
  modified_base 14: mod_base = OTHER; note = 2'-O-methyluridine-3'-phosphate
  modified_base 15: mod_base = OTHER; note = 2'-O-methyluridine-3'-phosphate
  modified_base 16: mod_base = OTHER; note = 2'-O-methyladenosine-3'-phosphate
  modified_base 17: mod_base = OTHER; note = 2'-O-methyluridine-3'-phosphate
  modified_base 18: mod_base = OTHER; note = 2'-O-methylcytidine-3'-phosphate
  modified_base 19: mod_base = OTHER; note = 2'-O-methylcytidine-3'-phosphate
  modified_base 20: mod_base = OTHER; note = 2'-O-methylcytidine-3'-phosphate
  modified_base 21: mod_base = OTHER; note 2'-O-methyladenosine-3'-phosphate-N-[tris(GalNAc-alkyl)-ami dodecanoyl)]-4-hydroxyprolinol
taccagttgccttttatccca

SEQ ID NO: 1802 - RNA, 21 nt, synthetic construct
  source 1..21: mol_type = other RNA
  modified_base 1: mod_base = OTHER; note = 2'-O-methyluridine-3'-phosphorothioate
  modified_base 2: mod_base = OTHER; note = 2'-O-methyladenosine-3'-phosphorothioate
  modified_base 3: mod_base = OTHER; note = 2'-O-methyluridine-3'-phosphate
  modified_base 4: mod_base = OTHER; note = 2'-O-methylcytidine-3'-phosphate
  modified_base 5: mod_base = OTHER; note = 2'-O-methylcytidine-3'-phosphate
  modified_base 6: mod_base = OTHER; note = 2'-O-methylcytidine-3'-phosphate
  modified_base 7: mod_base = OTHER; note = 2'-fluoroadenosine-3'-phosphate
  modified_base 8: mod_base = OTHER; note = 2'-O-methyladenosine-3'-phosphate
  modified_base 9: mod_base = OTHER; note = 2'-fluoroadenosine-3'-phosphate
  modified_base 10: mod_base = OTHER; note = 2'-fluoroguanosine-3'-phosphate
  modified_base 11: mod_base = OTHER; note = 2'-fluorouridine-3'-phosphate
  modified_base 12: mod_base = OTHER; note = 2'-O-methyluridine-3'-phosphate
  modified_base 13: mod_base = OTHER; note = 2'-O-methylguanosine-3'-phosphate
  modified_base 14: mod_base = OTHER; note = 2'-O-methyluridine-3'-phosphate
  modified_base 15: mod_base = OTHER; note = 2'-O-methyluridine-3'-phosphate
  modified_base 16: mod_base = OTHER; note = 2'-O-methylguanosine-3'-phosphate
  modified_base 17: mod_base = OTHER; note = 2'-O-methyluridine-3'-phosphate
  modified_base 18: mod_base = OTHER; note = 2'-O-methyladenosine-3'-phosphate
  modified_base 19: mod_base = OTHER; note = 2'-O-methyladenosine-3'-phosphate
  modified_base 20: mod_base = OTHER; note = 2'-O-methylcytidine-3'-phosphate
  modified_base 21: mod_base = OTHER; note 2'-O-methyladenosine-3'-phosphate-N-[tris(GalNAc-alkyl)-ami dodecanoyl)]-4-hydroxyprolinol
tatcccaaagttgttgtaaca

SEQ ID NO: 1803 - RNA, 21 nt, synthetic construct
  source 1..21: mol_type = other RNA
  modified_base 1: mod_base = OTHER; note = 2'-O-methylcytidine-3'-phosphorothioate
  modified_base 2: mod_base = OTHER; note = 2'-O-methylcytidine-3'-phosphorothioate
  modified_base 3: mod_base = OTHER; note = 2'-O-methylcytidine-3'-phosphate
  modified_base 4: mod_base = OTHER; note = 2'-O-methyladenosine-3'-phosphate
  modified_base 5: mod_base = OTHER; note = 2'-O-methyladenosine-3'-phosphate
  modified_base 6: mod_base = OTHER; note = 2'-O-methyladenosine-3'-phosphate
  modified_base 7: mod_base = OTHER; note = 2'-fluoroguanosine-3'-phosphate
  modified_base 8: mod_base = OTHER; note = 2'-O-methyluridine-3'-phosphate
  modified_base 9: mod_base = OTHER; note = 2'-fluorouridine-3'-phosphate
  modified_base 10: mod_base = OTHER; note = 2'-fluoroguanosine-3'-phosphate
  modified_base 11: mod_base = OTHER; note = 2'-fluorouridine-3'-phosphate
  modified_base 12: mod_base = OTHER; note = 2'-O-methyluridine-3'-phosphate
  modified_base 13: mod_base = OTHER; note = 2'-O-methylguanosine-3'-phosphate
  modified_base 14: mod_base = OTHER; note = 2'-O-methyluridine-3'-phosphate
  modified_base 15: mod_base = OTHER; note = 2'-O-methyladenosine-3'-phosphate
  modified_base 16: mod_base = OTHER; note = 2'-O-methyladenosine-3'-phosphate
  modified_base 17: mod_base = OTHER; note = 2'-O-methylcytidine-3'-phosphate
  modified_base 18: mod_base = OTHER; note = 2'-O-methylcytidine-3'-phosphate
  modified_base 19: mod_base = OTHER; note = 2'-O-methyluridine-3'-phosphate
  modified_base 20: mod_base = OTHER; note = 2'-O-methylguanosine-3'-phosphate
  modified_base 21: mod_base = OTHER; note 2'-O-methyladenosine-3'-phosphate-N-[tris(GalNAc-alkyl)-ami dodecanoyl)]-4-hydroxyprolinol
cccaaagttgttgtaacctga

SEQ ID NO: 1804 - RNA, 21 nt, synthetic construct
  source 1..21: mol_type = other RNA
  modified_base 1: mod_base = OTHER; note = 2'-O-methyluridine-3'-phosphorothioate
  modified_base 2: mod_base = OTHER; note = 2'-O-methyladenosine-3'-phosphorothioate
  modified_base 3: mod_base = OTHER; note = 2'-O-methylcytidine-3'-phosphate
  modified_base 4: mod_base = OTHER; note = 2'-O-methyluridine-3'-phosphate
  modified_base 5: mod_base = OTHER; note = 2'-O-methylguanosine-3'-phosphate
  modified_base 6: mod_base = OTHER; note = 2'-O-methyluridine-3'-phosphate
  modified_base 7: mod_base = OTHER; note = 2'-fluorouridine-3'-phosphate
  modified_base 8: mod_base = OTHER; note = 2'-O-methylguanosine-3'-phosphate
  modified_base 9: mod_base = OTHER; note = 2'-fluoroguanosine-3'-phosphate
  modified_base 10: mod_base = OTHER; note = 2'-fluoroadenosine-3'-phosphate
  modified_base 11: mod_base = OTHER; note = 2'-fluorouridine-3'-phosphate
  modified_base 12: mod_base = OTHER; note = 2'-O-methyluridine-3'-phosphate
  modified_base 13: mod_base = OTHER; note = 2'-O-methylguanosine-3'-phosphate
  modified_base 14: mod_base = OTHER; note = 2'-O-methyladenosine-3'-phosphate
  modified_base 15: mod_base = OTHER; note = 2'-O-methyluridine-3'-phosphate
  modified_base 16: mod_base = OTHER; note = 2'-O-methyluridine-3'-phosphate
  modified_base 17: mod_base = OTHER; note = 2'-O-methylcytidine-3'-phosphate
  modified_base 18: mod_base = OTHER; note = 2'-O-methylguanosine-3'-phosphate
  modified_base 19: mod_base = OTHER; note = 2'-O-methyladenosine-3'-phosphate
  modified_base 20: mod_base = OTHER; note = 2'-O-methyladenosine-3'-phosphate
  modified_base 21: mod_base = OTHER; note 2'-O-methyladenosine-3'-phosphate-N-[tris(GalNAc-alkyl)-ami dodecanoyl)]-4-hydroxyprolinol
tactgttggattgattcgaaa

SEQ ID NO: 1805 - RNA, 23 nt, synthetic construct
  source 1..23: mol_type = other RNA
  modified_base 1: mod_base = OTHER; note Vinyl-phosphonate-2'-O-methyluridine-3'-phosphorothioate
  modified_base 2: mod_base = OTHER; note = 2'-fluoroadenosine-3'-phosphorothioate
  modified_base 3: mod_base = OTHER; note = 2'-O-methylcytidine-3'-phosphate
  modified_base 4: mod_base = OTHER; note = 2'-O-methylcytidine-3'-phosphate
  modified_base 5: mod_base = OTHER; note = 2'-O-methyladenosine-3'-phosphate
  modified_base 6: mod_base = OTHER; note = 2'-fluoroguanosine-3'-phosphate
  modified_base 7: mod_base = OTHER; note = 2'-O-methyladenosine-3'-phosphate
  modified_base 8: mod_base = OTHER; note = 2'-fluoroadenosine-3'-phosphate
  modified_base 9: mod_base = OTHER; note = 2'-fluorouridine-3'-phosphate
  modified_base 10: mod_base = OTHER; note = 2'-O-methylguanosine-3'-phosphate
  modified_base 11: mod_base = OTHER; note = 2'-O-methylguanosine-3'-phosphate
  modified_base 12: mod_base = OTHER; note = 2'-O-methyladenosine-3'-phosphate
  modified_base 13: mod_base = OTHER; note = 2'-O-methyluridine-3'-phosphate
  modified_base 14: mod_base = OTHER; note = 2'-fluorouridine-3'-phosphate
  modified_base 15: mod_base = OTHER; note = 2'-O-methylcytidine-3'-phosphate
  modified_base 16: mod_base = OTHER; note = 2'-fluorocytidine-3'-phosphate
  modified_base 17: mod_base = OTHER; note = 2'-O-methyladenosine-3'-phosphate
  modified_base 18: mod_base = OTHER; note = 2'-O-methylguanosine-3'-phosphate
  modified_base 19: mod_base = OTHER; note = 2'-O-methyladenosine-3'-phosphate
  modified_base 20: mod_base = OTHER; note = 2'-O-methylguanosine-3'-phosphate
  modified_base 21: mod_base = OTHER; note = 2'-O-methyluridine-3'-phosphorothioate
  modified_base 22: mod_base = OTHER; note = 2'-O-methylcytidine-3'-phosphorothioate
  modified_base 23: mod_base = OTHER; note = 2'-O-methylcytidine-3'-phosphate
taccagaatggattccagagtcc

SEQ ID NO: 1806 - RNA, 23 nt, synthetic construct
  source 1..23: mol_type = other RNA
  modified_base 1: mod_base = OTHER; note Vinyl-phosphonate-2'-O-methyluridine-3'-phosphorothioate
  modified_base 2: mod_base = OTHER; note = 2'-fluorocytidine-3'-phosphorothioate
  modified_base 3: mod_base = OTHER; note = 2'-O-methyladenosine-3'-phosphate
  modified_base 4: mod_base = OTHER; note = 2'-O-methylcytidine-3'-phosphate
  modified_base 5: mod_base = OTHER; note = 2'-O-methylcytidine-3'-phosphate
  modified_base 6: mod_base = OTHER; note = 2'-fluoroadenosine-3'-phosphate
  modified_base 7: mod_base = OTHER; note = 2'-O-methylguanosine-3'-phosphate
  modified_base 8: mod_base = OTHER; note = 2'-fluoroadenosine-3'-phosphate
  modified_base 9: mod_base = OTHER; note = 2'-fluoroadenosine-3'-phosphate
  modified_base 10: mod_base = OTHER; note = 2'-O-methyluridine-3'-phosphate
  modified_base 11: mod_base = OTHER; note = 2'-O-methylguanosine-3'-phosphate
  modified_base 12: mod_base = OTHER; note = 2'-O-methylguanosine-3'-phosphate
  modified_base 13: mod_base = OTHER; note = 2'-O-methyladenosine-3'-phosphate
  modified_base 14: mod_base = OTHER; note = 2'-fluorouridine-3'-phosphate
  modified_base 15: mod_base = OTHER; note = 2'-O-methyluridine-3'-phosphate
  modified_base 16: mod_base = OTHER; note = 2'-fluorocytidine-3'-phosphate
  modified_base 17: mod_base = OTHER; note = 2'-O-methylcytidine-3'-phosphate
  modified_base 18: mod_base = OTHER; note = 2'-O-methyladenosine-3'-phosphate
  modified_base 19: mod_base = OTHER; note = 2'-O-methylguanosine-3'-phosphate
  modified_base 20: mod_base = OTHER; note = 2'-O-methyladenosine-3'-phosphate
  modified_base 21: mod_base = OTHER; note = 2'-O-methylguanosine-3'-phosphorothioate
  modified_base 22: mod_base = OTHER; note = 2'-O-methyluridine-3'-phosphorothioate
  modified_base 23: mod_base = OTHER; note = 2'-O-methylcytidine-3'-phosphate
tcaccagaatggattccagagtc

SEQ ID NO: 1807 - RNA, 23 nt, synthetic construct
  source 1..23: mol_type = other RNA
  modified_base 1: mod_base = OTHER; note Vinyl-phosphonate-2'-O-methyluridine-3'-phosphorothioate
  modified_base 2: mod_base = OTHER; note = 2'-fluoroguanosine-3'-phosphorothioate
  modified_base 3: mod_base = OTHER; note = 2'-O-methylguanosine-3'-phosphate
  modified_base 4: mod_base = OTHER; note = 2'-O-methyladenosine-3'-phosphate
  modified_base 5: mod_base = OTHER; note = 2'-O-methylcytidine-3'-phosphate
  modified_base 6: mod_base = OTHER; note = 2'-fluoroadenosine-3'-phosphate
  modified_base 7: mod_base = OTHER; note = 2'-O-methyluridine-3'-phosphate
  modified_base 8: mod_base = OTHER; note = 2'-fluorouridine-3'-phosphate
  modified_base 9: mod_base = OTHER; note = 2'-fluoroadenosine-3'-phosphate
  modified_base 10: mod_base = OTHER; note = 2'-O-methylguanosine-3'-phosphate
  modified_base 11: mod_base = OTHER; note = 2'-O-methyluridine-3'-phosphate
  modified_base 12: mod_base = OTHER; note = 2'-O-methylguanosine-3'-phosphate
  modified_base 13: mod_base = OTHER; note = 2'-O-methylguanosine-3'-phosphate
  modified_base 14: mod_base = OTHER; note = 2'-fluoroguanosine-3'-phosphate
  modified_base 15: mod_base = OTHER; note = 2'-O-methyladenosine-3'-phosphate
  modified_base 16: mod_base = OTHER; note = 2'-fluorouridine-3'-phosphate
  modified_base 17: mod_base = OTHER; note = 2'-O-methylguanosine-3'-phosphate
  modified_base 18: mod_base = OTHER; note = 2'-O-methyladenosine-3'-phosphate
  modified_base 19: mod_base = OTHER; note = 2'-O-methylguanosine-3'-phosphate
  modified_base 20: mod_base = OTHER; note = 2'-O-methylcytidine-3'-phosphate
  modified_base 21: mod_base = OTHER; note = 2'-O-methyladenosine-3'-phosphorothioate
  modified_base 22: mod_base = OTHER; note = 2'-O-methylguanosine-3'-phosphorothioate
  modified_base 23: mod_base = OTHER; note = 2'-O-methylcytidine-3'-phosphate
tggacattagtgggatgagcagc

SEQ ID NO: 1808 - RNA, 23 nt, synthetic construct
  source 1..23: mol_type = other RNA
  modified_base 1: mod_base = OTHER; note Vinyl-phosphonate-2'-O-methyluridine-3'-phosphorothioate
  modified_base 2: mod_base = OTHER; note = 2'-fluorocytidine-3'-phosphorothioate
  modified_base 3: mod_base = OTHER; note = 2'-O-methyluridine-3'-phosphate
  modified_base 4: mod_base = OTHER; note = 2'-O-methylguanosine-3'-phosphate
  modified_base 5: mod_base = OTHER; note = 2'-O-methylguanosine-3'-phosphate
  modified_base 6: mod_base = OTHER; note = 2'-fluoroadenosine-3'-phosphate
  modified_base 7: mod_base = OTHER; note = 2'-O-methylcytidine-3'-phosphate
  modified_base 8: mod_base = OTHER; note = 2'-fluoroadenosine-3'-phosphate
  modified_base 9: mod_base = OTHER; note = 2'-fluorouridine-3'-phosphate
  modified_base 10: mod_base = OTHER; note = 2'-O-methyluridine-3'-phosphate
  modified_base 11: mod_base = OTHER; note = 2'-O-methyladenosine-3'-phosphate
  modified_base 12: mod_base = OTHER; note = 2'-O-methylguanosine-3'-phosphate
  modified_base 13: mod_base = OTHER; note = 2'-O-methyluridine-3'-phosphate
  modified_base 14: mod_base = OTHER; note = 2'-fluoroguanosine-3'-phosphate
  modified_base 15: mod_base = OTHER; note = 2'-O-methylguanosine-3'-phosphate
  modified_base 16: mod_base = OTHER; note = 2'-fluoroguanosine-3'-phosphate
  modified_base 17: mod_base = OTHER; note = 2'-O-methyladenosine-3'-phosphate
  modified_base 18: mod_base = OTHER; note = 2'-O-methyluridine-3'-phosphate
  modified_base 19: mod_base = OTHER; note = 2'-O-methylguanosine-3'-phosphate
  modified_base 20: mod_base = OTHER; note = 2'-O-methyladenosine-3'-phosphate
  modified_base 21: mod_base = OTHER; note = 2'-O-methylguanosine-3'-phosphorothioate
  modified_base 22: mod_base = OTHER; note = 2'-O-methylcytidine-3'-phosphorothioate
  modified_base 23: mod_base = OTHER; note = 2'-O-methyladenosine-3'-phosphate
tctggacattagtgggatgagca

SEQ ID NO: 1809 - RNA, 23 nt, synthetic construct
  source 1..23: mol_type = other RNA
  modified_base 1: mod_base = OTHER; note Vinyl-phosphonate-2'-O-methyluridine-3'-phosphorothioate
  modified_base 2: mod_base = OTHER; note = 2'-fluoroadenosine-3'-phosphorothioate
  modified_base 3: mod_base = OTHER; note = 2'-O-methyluridine-3'-phosphate
  modified_base 4: mod_base = OTHER; note = 2'-O-methylcytidine-3'-phosphate
  modified_base 5: mod_base = OTHER; note = 2'-O-methyladenosine-3'-phosphate
  modified_base 6: mod_base = OTHER; note = 2'-fluorouridine-3'-phosphate
  modified_base 7: mod_base = OTHER; note = 2'-O-methyluridine-3'-phosphate
  modified_base 8: mod_base = OTHER; note = 2'-fluorouridine-3'-phosphate
  modified_base 9: mod_base = OTHER; note = 2'-fluoroguanosine-3'-phosphate
  modified_base 10: mod_base = OTHER; note = 2'-O-methyluridine-3'-phosphate
  modified_base 11: mod_base = OTHER; note = 2'-O-methyladenosine-3'-phosphate
  modified_base 12: mod_base = OTHER; note = 2'-O-methyluridine-3'-phosphate
  modified_base 13: mod_base = OTHER; note = 2'-O-methyluridine-3'-phosphate
  modified_base 14: mod_base = OTHER; note = 2'-fluorocytidine-3'-phosphate
  modified_base 15: mod_base = OTHER; note = 2'-O-methyluridine-3'-phosphate
  modified_base 16: mod_base = OTHER; note = 2'-fluoroguanosine-3'-phosphate
  modified_base 17: mod_base = OTHER; note = 2'-O-methylcytidine-3'-phosphate
  modified_base 18: mod_base = OTHER; note = 2'-O-methyladenosine-3'-phosphate
  modified_base 19: mod_base = OTHER; note = 2'-O-methyluridine-3'-phosphate
  modified_base 20: mod_base = OTHER; note = 2'-O-methylguanosine-3'-phosphate
  modified_base 21: mod_base = OTHER; note = 2'-O-methylguanosine-3'-phosphorothioate
  modified_base 22: mod_base = OTHER; note = 2'-O-methyluridine-3'-phosphorothioate
  modified_base 23: mod_base = OTHER; note = 2'-O-methyladenosine-3'-phosphate
tatcatttgtattctgcatggta

SEQ ID NO: 1810 - RNA, 23 nt, synthetic construct
  source 1..23: mol_type = other RNA
  modified_base 1: mod_base = OTHER; note Vinyl-phosphonate-2'-O-methyluridine-3'-phosphorothioate
  modified_base 2: mod_base = OTHER; note = 2'-fluorocytidine-3'-phosphorothioate
  modified_base 3: mod_base = OTHER; note = 2'-O-methyladenosine-3'-phosphate
  modified_base 4: mod_base = OTHER; note = 2'-O-methyluridine-3'-phosphate
  modified_base 5: mod_base = OTHER; note = 2'-O-methylcytidine-3'-phosphate
  modified_base 6: mod_base = OTHER; note = 2'-fluoroadenosine-3'-phosphate
  modified_base 7: mod_base = OTHER; note = 2'-O-methyluridine-3'-phosphate
  modified_base 8: mod_base = OTHER; note = 2'-fluorouridine-3'-phosphate
  modified_base 9: mod_base = OTHER; note = 2'-fluorouridine-3'-phosphate
  modified_base 10: mod_base = OTHER; note = 2'-O-methylguanosine-3'-phosphate
  modified_base 11: mod_base = OTHER; note = 2'-O-methyluridine-3'-phosphate
  modified_base 12: mod_base = OTHER; note = 2'-O-methyladenosine-3'-phosphate
  modified_base 13: mod_base = OTHER; note = 2'-O-methyluridine-3'-phosphate
  modified_base 14: mod_base = OTHER; note = 2'-fluorouridine-3'-phosphate
  modified_base 15: mod_base = OTHER; note = 2'-O-methylcytidine-3'-phosphate
  modified_base 16: mod_base = OTHER; note = 2'-fluorouridine-3'-phosphate
  modified_base 17: mod_base = OTHER; note = 2'-O-methylguanosine-3'-phosphate
  modified_base 18: mod_base = OTHER; note = 2'-O-methylcytidine-3'-phosphate
  modified_base 19: mod_base = OTHER; note = 2'-O-methyladenosine-3'-phosphate
  modified_base 20: mod_base = OTHER; note = 2'-O-methyluridine-3'-phosphate
  modified_base 21: mod_base = OTHER; note = 2'-O-methylguanosine-3'-phosphorothioate
  modified_base 22: mod_base = OTHER; note = 2'-O-methylguanosine-3'-phosphorothioate
  modified_base 23: mod_base = OTHER; note = 2'-O-methyluridine-3'-phosphate
tcatcatttgtattctgcatggt

SEQ ID NO: 1811 - RNA, 23 nt, synthetic construct
  source 1..23: mol_type = other RNA
  modified_base 1: mod_base = OTHER; note Vinyl-phosphonate-2'-O-methyluridine-3'-phosphorothioate
  modified_base 2: mod_base = OTHER; note = 2'-fluorocytidine-3'-phosphorothioate
  modified_base 3: mod_base = OTHER; note = 2'-O-methyluridine-3'-phosphate
  modified_base 4: mod_base = OTHER; note = 2'-O-methylguanosine-3'-phosphate
  modified_base 5: mod_base = OTHER; note = 2'-O-methylcytidine-3'-phosphate
  modified_base 6: mod_base = OTHER; note = 2'-fluorocytidine-3'-phosphate
  modified_base 7: mod_base = OTHER; note = 2'-O-methyladenosine-3'-phosphate
  modified_base 8: mod_base = OTHER; note = 2'-fluorouridine-3'-phosphate
  modified_base 9: mod_base = OTHER; note = 2'-fluorouridine-3'-phosphate
  modified_base 10: mod_base = OTHER; note = 2'-O-methyluridine-3'-phosphate
  modified_base 11: mod_base = OTHER; note = 2'-O-methyluridine-3'-phosphate
  modified_base 12: mod_base = OTHER; note = 2'-O-methyladenosine-3'-phosphate
  modified_base 13: mod_base = OTHER; note = 2'-O-methylguanosine-3'-phosphate
  modified_base 14: mod_base = OTHER; note = 2'-fluorocytidine-3'-phosphate
  modified_base 15: mod_base = OTHER; note = 2'-O-methyluridine-3'-phosphate
  modified_base 16: mod_base = OTHER; note = 2'-fluorocytidine-3'-phosphate
  modified_base 17: mod_base = OTHER; note = 2'-O-methylcytidine-3'-phosphate
  modified_base 18: mod_base = OTHER; note = 2'-O-methyluridine-3'-phosphate
  modified_base 19: mod_base = OTHER; note = 2'-O-methyluridine-3'-phosphate
  modified_base 20: mod_base = OTHER; note = 2'-O-methylcytidine-3'-phosphate
  modified_base 21: mod_base = OTHER; note = 2'-O-methyluridine-3'-phosphorothioate
  modified_base 22: mod_base = OTHER; note = 2'-O-methyluridine-3'-phosphorothioate
  modified_base 23: mod_base = OTHER; note = 2'-O-methylguanosine-3'-phosphate
tctgccattttagctccttcttg

SEQ ID NO: 1812 - RNA, 23 nt, synthetic construct
  source 1..23: mol_type = other RNA
  modified_base 1: mod_base = OTHER; note Vinyl-phosphonate-2'-O-methyluridine-3'-phosphorothioate
  modified_base 2: mod_base = OTHER; note = 2'-fluorocytidine-3'-phosphorothioate
  modified_base 3: mod_base = OTHER; note = 2'-O-methylguanosine-3'-phosphate
  modified_base 4: mod_base = OTHER; note = 2'-O-methylcytidine-3'-phosphate
  modified_base 5: mod_base = OTHER; note = 2'-O-methyladenosine-3'-phosphate
  modified_base 6: mod_base = OTHER; note = 2'-fluorocytidine-3'-phosphate
  modified_base 7: mod_base = OTHER; note = 2'-O-methyluridine-3'-phosphate
  modified_base 8: mod_base = OTHER; note = 2'-fluoroguanosine-3'-phosphate
  modified_base 9: mod_base = OTHER; note = 2'-fluorocytidine-3'-phosphate
  modified_base 10: mod_base = OTHER; note = 2'-O-methylcytidine-3'-phosphate
  modified_base 11: mod_base = OTHER; note = 2'-O-methyladenosine-3'-phosphate
  modified_base 12: mod_base = OTHER; note = 2'-O-methyluridine-3'-phosphate
  modified_base 13: mod_base = OTHER; note = 2'-O-methyluridine-3'-phosphate
  modified_base 14: mod_base = OTHER; note = 2'-fluorouridine-3'-phosphate
  modified_base 15: mod_base = OTHER; note = 2'-O-methyluridine-3'-phosphate
  modified_base 16: mod_base = OTHER; note = 2'-fluoroadenosine-3'-phosphate
  modified_base 17: mod_base = OTHER; note = 2'-O-methylguanosine-3'-phosphate
  modified_base 18: mod_base = OTHER; note = 2'-O-methylcytidine-3'-phosphate
  modified_base 19: mod_base = OTHER; note = 2'-O-methyluridine-3'-phosphate
  modified_base 20: mod_base = OTHER; note = 2'-O-methylcytidine-3'-phosphate
  modified_base 21: mod_base = OTHER; note = 2'-O-methylcytidine-3'-phosphorothioate
  modified_base 22: mod_base = OTHER; note = 2'-O-methyluridine-3'-phosphorothioate
  modified_base 23: mod_base = OTHER; note = 2'-O-methyluridine-3'-phosphate
tcgcactgccattttagctcctt

SEQ ID NO: 1813 - RNA, 23 nt, synthetic construct
  source 1..23: mol_type = other RNA
  modified_base 1: mod_base = OTHER; note Vinyl-phosphonate-2'-O-methyluridine-3'-phosphorothioate
  modified_base 2: mod_base = OTHER; note = 2'-fluoroadenosine-3'-phosphorothioate
  modified_base 3: mod_base = OTHER; note = 2'-O-methylguanosine-3'-phosphate
  modified_base 4: mod_base = OTHER; note = 2'-O-methyladenosine-3'-phosphate
  modified_base 5: mod_base = OTHER; note = 2'-O-methylcytidine-3'-phosphate
  modified_base 6: mod_base = OTHER; note = 2'-fluorouridine-3'-phosphate
  modified_base 7: mod_base = OTHER; note = 2'-O-methyluridine-3'-phosphate
  modified_base 8: mod_base = OTHER; note = 2'-fluoroadenosine-3'-phosphate
  modified_base 9: mod_base = OTHER; note = 2'-fluoroadenosine-3'-phosphate
  modified_base 10: mod_base = OTHER; note = 2'-O-methyladenosine-3'-phosphate
  modified_base 11: mod_base = OTHER; note = 2'-O-methylguanosine-3'-phosphate
  modified_base 12: mod_base = OTHER; note = 2'-O-methyladenosine-3'-phosphate
  modified_base 13: mod_base = OTHER; note = 2'-O-methyluridine-3'-phosphate
  modified_base 14: mod_base = OTHER; note = 2'-fluoroguanosine-3'-phosphate
  modified_base 15: mod_base = OTHER; note = 2'-O-methylguanosine-3'-phosphate
  modified_base 16: mod_base = OTHER; note = 2'-fluorocytidine-3'-phosphate
  modified_base 17: mod_base = OTHER; note = 2'-O-methylcytidine-3'-phosphate
  modified_base 18: mod_base = OTHER; note = 2'-O-methyladenosine-3'-phosphate
  modified_base 19: mod_base = OTHER; note = 2'-O-methylguanosine-3'-phosphate
  modified_base 20: mod_base = OTHER; note = 2'-O-methyluridine-3'-phosphate
  modified_base 21: mod_base = OTHER; note = 2'-O-methyladenosine-3'-phosphorothioate
  modified_base 22: mod_base = OTHER; note = 2'-O-methyladenosine-3'-phosphorothioate
  modified_base 23: mod_base = OTHER; note = 2'-O-methylguanosine-3'-phosphate
tagacttaaagatggccagtaag

SEQ ID NO: 1814 - RNA, 23 nt, synthetic construct
  source 1..23: mol_type = other RNA
  modified_base 1: mod_base = OTHER; note Vinyl-phosphonate-2'-O-methyluridine-3'-phosphorothioate
  modified_base 2: mod_base = OTHER; note = 2'-fluorocytidine-3'-phosphorothioate
  modified_base 3: mod_base = OTHER; note = 2'-O-methyladenosine-3'-phosphate
  modified_base 4: mod_base = OTHER; note = 2'-O-methylguanosine-3'-phosphate
  modified_base 5: mod_base = OTHER; note = 2'-O-methyladenosine-3'-phosphate
  modified_base 6: mod_base = OTHER; note = 2'-fluorocytidine-3'-phosphate
  modified_base 7: mod_base = OTHER; note = 2'-O-methyluridine-3'-phosphate
  modified_base 8: mod_base = OTHER; note = 2'-fluorouridine-3'-phosphate
  modified_base 9: mod_base = OTHER; note = 2'-fluoroadenosine-3'-phosphate
  modified_base 10: mod_base = OTHER; note = 2'-O-methyladenosine-3'-phosphate
  modified_base 11: mod_base = OTHER; note = 2'-O-methyladenosine-3'-phosphate
  modified_base 12: mod_base = OTHER; note = 2'-O-methylguanosine-3'-phosphate
  modified_base 13: mod_base = OTHER; note = 2'-O-methyladenosine-3'-phosphate
  modified_base 14: mod_base = OTHER; note = 2'-fluorouridine-3'-phosphate
  modified_base 15: mod_base = OTHER; note = 2'-O-methylguanosine-3'-phosphate
  modified_base 16: mod_base = OTHER; note = 2'-fluoroguanosine-3'-phosphate
  modified_base 17: mod_base = OTHER; note = 2'-O-methylcytidine-3'-phosphate
  modified_base 18: mod_base = OTHER; note = 2'-O-methylcytidine-3'-phosphate
  modified_base 19: mod_base = OTHER; note = 2'-O-methyladenosine-3'-phosphate
  modified_base 20: mod_base = OTHER; note = 2'-O-methylguanosine-3'-phosphate
  modified_base 21: mod_base = OTHER; note = 2'-O-methyluridine-3'-phosphorothioate
  modified_base 22: mod_base = OTHER; note = 2'-O-methyladenosine-3'-phosphorothioate
  modified_base 23: mod_base = OTHER; note = 2'-O-methyladenosine-3'-phosphate
tcagacttaaagatggccagtaa

SEQ ID NO: 1815 - RNA, 23 nt, synthetic construct
  source 1..23: mol_type = other RNA
  modified_base 1: mod_base = OTHER; note Vinyl-phosphonate-2'-O-methyluridine-3'-phosphorothioate
  modified_base 2: mod_base = OTHER; note = 2'-fluorocytidine-3'-phosphorothioate
  modified_base 3: mod_base = OTHER; note = 2'-O-methylcytidine-3'-phosphate
  modified_base 4: mod_base = OTHER; note = 2'-O-methyladenosine-3'-phosphate
  modified_base 5: mod_base = OTHER; note = 2'-O-methylguanosine-3'-phosphate
  modified_base 6: mod_base = OTHER; note = 2'-fluoroadenosine-3'-phosphate
  modified_base 7: mod_base = OTHER; note = 2'-O-methylcytidine-3'-phosphate
  modified_base 8: mod_base = OTHER; note = 2'-fluorouridine-3'-phosphate
  modified_base 9: mod_base = OTHER; note = 2'-fluorouridine-3'-phosphate
  modified_base 10: mod_base = OTHER; note = 2'-O-methyladenosine-3'-phosphate
  modified_base 11: mod_base = OTHER; note = 2'-O-methyladenosine-3'-phosphate
  modified_base 12: mod_base = OTHER; note = 2'-O-methyladenosine-3'-phosphate
  modified_base 13: mod_base = OTHER; note = 2'-O-methylguanosine-3'-phosphate
  modified_base 14: mod_base = OTHER; note = 2'-fluoroadenosine-3'-phosphate
  modified_base 15: mod_base = OTHER; note = 2'-O-methyluridine-3'-phosphate
  modified_base 16: mod_base = OTHER; note = 2'-fluoroguanosine-3'-phosphate
  modified_base 17: mod_base = OTHER; note = 2'-O-methylguanosine-3'-phosphate
  modified_base 18: mod_base = OTHER; note = 2'-O-methylcytidine-3'-phosphate
  modified_base 19: mod_base = OTHER; note = 2'-O-methylcytidine-3'-phosphate
  modified_base 20: mod_base = OTHER; note = 2'-O-methyladenosine-3'-phosphate
  modified_base 21: mod_base = OTHER; note = 2'-O-methylguanosine-3'-phosphorothioate
  modified_base 22: mod_base = OTHER; note = 2'-O-methyluridine-3'-phosphorothioate
  modified_base 23: mod_base = OTHER; note = 2'-O-methyladenosine-3'-phosphate
tccagacttaaagatggccagta

SEQ ID NO: 1816 - RNA, 23 nt, synthetic construct
  source 1..23: mol_type = other RNA
  modified_base 1: mod_base = OTHER; note Vinyl-phosphonate-2'-O-methyluridine-3'-phosphorothioate
  modified_base 2: mod_base = OTHER; note = 2'-fluoroadenosine-3'-phosphorothioate
  modified_base 3: mod_base = OTHER; note = 2'-O-methyladenosine-3'-phosphate
  modified_base 4: mod_base = OTHER; note = 2'-O-methyluridine-3'-phosphate
  modified_base 5: mod_base = OTHER; note = 2'-O-methyluridine-3'-phosphate
  modified_base 6: mod_base = OTHER; note = 2'-fluoroadenosine-3'-phosphate
  modified_base 7: mod_base = OTHER; note = 2'-O-methyluridine-3'-phosphate
  modified_base 8: mod_base = OTHER; note = 2'-fluorouridine-3'-phosphate
  modified_base 9: mod_base = OTHER; note = 2'-fluoroguanosine-3'-phosphate
  modified_base 10: mod_base = OTHER; note = 2'-O-methylcytidine-3'-phosphate
  modified_base 11: mod_base = OTHER; note = 2'-O-methyladenosine-3'-phosphate
  modified_base 12: mod_base = OTHER; note = 2'-O-methyladenosine-3'-phosphate
  modified_base 13: mod_base = OTHER; note = 2'-O-methylguanosine-3'-phosphate
  modified_base 14: mod_base = OTHER; note = 2'-fluorouridine-3'-phosphate
  modified_base 15: mod_base = OTHER; note = 2'-O-methylguanosine-3'-phosphate
  modified_base 16: mod_base = OTHER; note = 2'-fluoroadenosine-3'-phosphate
  modified_base 17: mod_base = OTHER; note = 2'-O-methylguanosine-3'-phosphate
  modified_base 18: mod_base = OTHER; note = 2'-O-methylguanosine-3'-phosphate
  modified_base 19: mod_base = OTHER; note = 2'-O-methyluridine-3'-phosphate
  modified_base 20: mod_base = OTHER; note = 2'-O-methyluridine-3'-phosphate
  modified_base 21: mod_base = OTHER; note = 2'-O-methyladenosine-3'-phosphorothioate
  modified_base 22: mod_base = OTHER; note = 2'-O-methylguanosine-3'-phosphorothioate
  modified_base 23: mod_base = OTHER; note = 2'-O-methyladenosine-3'-phosphate
taattattgcaagtgaggttaga

SEQ ID NO: 1817 - RNA, 23 nt, synthetic construct
  source 1..23: mol_type = other RNA
  modified_base 1: mod_base = OTHER; note Vinyl-phosphonate-2'-O-methyluridine-3'-phosphorothioate
  modified_base 2: mod_base = OTHER; note = 2'-fluorouridine -3'-phosphorothioate
  modified_base 3: mod_base = OTHER; note = 2'-O-methyladenosine-3'-phosphate
  modified_base 4: mod_base = OTHER; note = 2'-O-methyladenosine-3'-phosphate
  modified_base 5: mod_base = OTHER; note = 2'-O-methyluridine-3'-phosphate
  modified_base 6: mod_base = OTHER; note = 2'-fluorouridine-3'-phosphate
  modified_base 7: mod_base = OTHER; note = 2'-O-methyladenosine-3'-phosphate
  modified_base 8: mod_base = OTHER; note = 2'-fluorouridine-3'-phosphate
  modified_base 9: mod_base = OTHER; note = 2'-fluorouridine-3'-phosphate
  modified_base 10: mod_base = OTHER; note = 2'-O-methylguanosine-3'-phosphate
  modified_base 11: mod_base = OTHER; note = 2'-O-methylcytidine-3'-phosphate
  modified_base 12: mod_base = OTHER; note = 2'-O-methyladenosine-3'-phosphate
  modified_base 13: mod_base = OTHER; note = 2'-O-methyladenosine-3'-phosphate
  modified_base 14: mod_base = OTHER; note = 2'-fluoroguanosine-3'-phosphate
  modified_base 15: mod_base = OTHER; note = 2'-O-methyluridine-3'-phosphate
  modified_base 16: mod_base = OTHER; note = 2'-fluoroguanosine-3'-phosphate
  modified_base 17: mod_base = OTHER; note = 2'-O-methyladenosine-3'-phosphate
  modified_base 18: mod_base = OTHER; note = 2'-O-methylguanosine-3'-phosphate
  modified_base 19: mod_base = OTHER; note = 2'-O-methylguanosine-3'-phosphate
  modified_base 20: mod_base = OTHER; note = 2'-O-methyluridine-3'-phosphate
  modified_base 21: mod_base = OTHER; note = 2'-O-methyluridine-3'-phosphorothioate
  modified_base 22: mod_base = OTHER; note = 2'-O-methyladenosine-3'-phosphorothioate
  modified_base 23: mod_base = OTHER; note = 2'-O-methylguanosine-3'-phosphate
ttaattattgcaagtgaggttag

SEQ ID NO: 1818 - RNA, 23 nt, synthetic construct
  source 1..23: mol_type = other RNA
  modified_base 1: mod_base = OTHER; note Vinyl-phosphonate-2'-O-methyluridine-3'-phosphorothioate
  modified_base 2: mod_base = OTHER; note = 2'-fluorouridine -3'-phosphorothioate
  modified_base 3: mod_base = OTHER; note = 2'-O-methylguanosine-3'-phosphate
  modified_base 4: mod_base = OTHER; note = 2'-O-methyladenosine-3'-phosphate
  modified_base 5: mod_base = OTHER; note = 2'-O-methylcytidine-3'-phosphate
  modified_base 6: mod_base = OTHER; note = 2'-fluoroguanosine-3'-phosphate
  modified_base 7: mod_base = OTHER; note = 2'-O-methyladenosine-3'-phosphate
  modified_base 8: mod_base = OTHER; note = 2'-fluoroadenosine-3'-phosphate
  modified_base 9: mod_base = OTHER; note = 2'-fluoroguanosine-3'-phosphate
  modified_base 10: mod_base = OTHER; note = 2'-O-methyladenosine-3'-phosphate
  modified_base 11: mod_base = OTHER; note = 2'-O-methylguanosine-3'-phosphate
  modified_base 12: mod_base = OTHER; note = 2'-O-methylcytidine-3'-phosphate
  modified_base 13: mod_base = OTHER; note = 2'-O-methyladenosine-3'-phosphate
  modified_base 14: mod_base = OTHER; note = 2'-fluorocytidine-3'-phosphate
  modified_base 15: mod_base = OTHER; note = 2'-O-methyladenosine-3'-phosphate
  modified_base 16: mod_base = OTHER; note = 2'-fluoroguanosine-3'-phosphate
  modified_base 17: mod_base = OTHER; note = 2'-O-methyladenosine-3'-phosphate
  modified_base 18: mod_base = OTHER; note = 2'-O-methyluridine-3'-phosphate
  modified_base 19: mod_base = OTHER; note = 2'-O-methylguanosine-3'-phosphate
  modified_base 20: mod_base = OTHER; note = 2'-O-methylguanosine-3'-phosphate
  modified_base 21: mod_base = OTHER; note = 2'-O-methylcytidine-3'-phosphorothioate
  modified_base 22: mod_base = OTHER; note = 2'-O-methyladenosine-3'-phosphorothioate
  modified_base 23: mod_base = OTHER; note = 2'-O-methylguanosine-3'-phosphate
ttgacgaagagcacagatggcag

SEQ ID NO: 1819 - RNA, 23 nt, synthetic construct
  source 1..23: mol_type = other RNA
  modified_base 1: mod_base = OTHER; note Vinyl-phosphonate-2'-O-methyluridine-3'-phosphorothioate
  modified_base 2: mod_base = OTHER; note = 2'-fluoroadenosine-3'-phosphorothioate
  modified_base 3: mod_base = OTHER; note = 2'-O-methyluridine-3'-phosphate
  modified_base 4: mod_base = OTHER; note = 2'-O-methylguanosine-3'-phosphate
  modified_base 5: mod_base = OTHER; note = 2'-O-methyladenosine-3'-phosphate
  modified_base 6: mod_base = OTHER; note = 2'-fluorocytidine-3'-phosphate
  modified_base 7: mod_base = OTHER; note = 2'-O-methylguanosine-3'-phosphate
  modified_base 8: mod_base = OTHER; note = 2'-fluoroadenosine-3'-phosphate
  modified_base 9: mod_base = OTHER; note = 2'-fluoroadenosine-3'-phosphate
  modified_base 10: mod_base = OTHER; note = 2'-O-methylguanosine-3'-phosphate
  modified_base 11: mod_base = OTHER; note = 2'-O-methyladenosine-3'-phosphate
  modified_base 12: mod_base = OTHER; note = 2'-O-methylguanosine-3'-phosphate
  modified_base 13: mod_base = OTHER; note = 2'-O-methylcytidine-3'-phosphate
  modified_base 14: mod_base = OTHER; note = 2'-fluoroadenosine-3'-phosphate
  modified_base 15: mod_base = OTHER; note = 2'-O-methylcytidine-3'-phosphate
  modified_base 16: mod_base = OTHER; note = 2'-fluoroadenosine-3'-phosphate
  modified_base 17: mod_base = OTHER; note = 2'-O-methylguanosine-3'-phosphate
  modified_base 18: mod_base = OTHER; note = 2'-O-methyladenosine-3'-phosphate
  modified_base 19: mod_base = OTHER; note = 2'-O-methyluridine-3'-phosphate
  modified_base 20: mod_base = OTHER; note = 2'-O-methylguanosine-3'-phosphate
  modified_base 21: mod_base = OTHER; note = 2'-O-methylguanosine-3'-phosphorothioate
  modified_base 22: mod_base = OTHER; note = 2'-O-methylcytidine-3'-phosphorothioate
  modified_base 23: mod_base = OTHER; note = 2'-O-methyladenosine-3'-phosphate
tatgacgaagagcacagatggca

SEQ ID NO: 1820 - RNA, 23 nt, synthetic construct
  source 1..23: mol_type = other RNA
  modified_base 1: mod_base = OTHER; note Vinyl-phosphonate-2'-O-methyluridine-3'-phosphorothioate
  modified_base 2: mod_base = OTHER; note = 2'-fluoroadenosine-3'-phosphorothioate
  modified_base 3: mod_base = OTHER; note = 2'-O-methylguanosine-3'-phosphate
  modified_base 4: mod_base = OTHER; note = 2'-O-methyladenosine-3'-phosphate
  modified_base 5: mod_base = OTHER; note = 2'-O-methyluridine-3'-phosphate
  modified_base 6: mod_base = OTHER; note = 2'-fluoroguanosine-3'-phosphate
  modified_base 7: mod_base = OTHER; note = 2'-O-methyladenosine-3'-phosphate
  modified_base 8: mod_base = OTHER; note = 2'-fluorocytidine-3'-phosphate
  modified_base 9: mod_base = OTHER; note = 2'-fluoroguanosine-3'-phosphate
  modified_base 10: mod_base = OTHER; note = 2'-O-methyladenosine-3'-phosphate
  modified_base 11: mod_base = OTHER; note = 2'-O-methyladenosine-3'-phosphate
  modified_base 12: mod_base = OTHER; note = 2'-O-methylguanosine-3'-phosphate
  modified_base 13: mod_base = OTHER; note = 2'-O-methyladenosine-3'-phosphate
  modified_base 14: mod_base = OTHER; note = 2'-fluoroguanosine-3'-phosphate
  modified_base 15: mod_base = OTHER; note = 2'-O-methylcytidine-3'-phosphate
  modified_base 16: mod_base = OTHER; note = 2'-fluoroadenosine-3'-phosphate
  modified_base 17: mod_base = OTHER; note = 2'-O-methylcytidine-3'-phosphate
  modified_base 18: mod_base = OTHER; note = 2'-O-methyladenosine-3'-phosphate
  modified_base 19: mod_base = OTHER; note = 2'-O-methylguanosine-3'-phosphate
  modified_base 20: mod_base = OTHER; note = 2'-O-methyladenosine-3'-phosphate
  modified_base 21: mod_base = OTHER; note = 2'-O-methyluridine-3'-phosphorothioate
  modified_base 22: mod_base = OTHER; note = 2'-O-methylguanosine-3'-phosphorothioate
  modified_base 23: mod_base = OTHER; note = 2'-O-methylguanosine-3'-phosphate
tagatgacgaagagcacagatgg

SEQ ID NO: 1821 - RNA, 23 nt, synthetic construct
  source 1..23: mol_type = other RNA
  modified_base 1: mod_base = OTHER; note Vinyl-phosphonate-2'-O-methyluridine-3'-phosphorothioate
  modified_base 2: mod_base = OTHER; note = 2'-fluorocytidine-3'-phosphorothioate
  modified_base 3: mod_base = OTHER; note = 2'-O-methyladenosine-3'-phosphate
  modified_base 4: mod_base = OTHER; note = 2'-O-methylguanosine-3'-phosphate
  modified_base 5: mod_base = OTHER; note = 2'-O-methyladenosine-3'-phosphate
  modified_base 6: mod_base = OTHER; note = 2'-fluorouridine-3'-phosphate
  modified_base 7: mod_base = OTHER; note = 2'-O-methylguanosine-3'-phosphate
  modified_base 8: mod_base = OTHER; note = 2'-fluoroadenosine-3'-phosphate
  modified_base 9: mod_base = OTHER; note = 2'-fluorocytidine-3'-phosphate
  modified_base 10: mod_base = OTHER; note = 2'-O-methylguanosine-3'-phosphate
  modified_base 11: mod_base = OTHER; note = 2'-O-methyladenosine-3'-phosphate
  modified_base 12: mod_base = OTHER; note = 2'-O-methyladenosine-3'-phosphate
  modified_base 13: mod_base = OTHER; note = 2'-O-methylguanosine-3'-phosphate
  modified_base 14: mod_base = OTHER; note = 2'-fluoroadenosine-3'-phosphate
  modified_base 15: mod_base = OTHER; note = 2'-O-methylguanosine-3'-phosphate
  modified_base 16: mod_base = OTHER; note = 2'-fluorocytidine-3'-phosphate
  modified_base 17: mod_base = OTHER; note = 2'-O-methyladenosine-3'-phosphate
  modified_base 18: mod_base = OTHER; note = 2'-O-methylcytidine-3'-phosphate
  modified_base 19: mod_base = OTHER; note = 2'-O-methyladenosine-3'-phosphate
  modified_base 20: mod_base = OTHER; note = 2'-O-methylguanosine-3'-phosphate
  modified_base 21: mod_base = OTHER; note = 2'-O-methyladenosine-3'-phosphorothioate
  modified_base 22: mod_base = OTHER; note = 2'-O-methyluridine-3'-phosphorothioate
  modified_base 23: mod_base = OTHER; note = 2'-O-methylguanosine-3'-phosphate
tcagatgacgaagagcacagatg

SEQ ID NO: 1822 - RNA, 23 nt, synthetic construct
  source 1..23: mol_type = other RNA
  modified_base 1: mod_base = OTHER; note Vinyl-phosphonate-2'-O-methyluridine-3'-phosphorothioate
  modified_base 2: mod_base = OTHER; note = 2'-fluorouridine -3'-phosphorothioate
  modified_base 3: mod_base = OTHER; note = 2'-O-methylcytidine-3'-phosphate
  modified_base 4: mod_base = OTHER; note = 2'-O-methyladenosine-3'-phosphate
  modified_base 5: mod_base = OTHER; note = 2'-O-methylguanosine-3'-phosphate
  modified_base 6: mod_base = OTHER; note = 2'-fluoroadenosine-3'-phosphate
  modified_base 7: mod_base = OTHER; note = 2'-O-methyluridine-3'-phosphate
  modified_base 8: mod_base = OTHER; note = 2'-fluoroguanosine-3'-phosphate
  modified_base 9: mod_base = OTHER; note = 2'-fluoroadenosine-3'-phosphate
  modified_base 10: mod_base = OTHER; note = 2'-O-methylcytidine-3'-phosphate
  modified_base 11: mod_base = OTHER; note = 2'-O-methylguanosine-3'-phosphate
  modified_base 12: mod_base = OTHER; note = 2'-O-methyladenosine-3'-phosphate
  modified_base 13: mod_base = OTHER; note = 2'-O-methyladenosine-3'-phosphate
  modified_base 14: mod_base = OTHER; note = 2'-fluoroguanosine-3'-phosphate
  modified_base 15: mod_base = OTHER; note = 2'-O-methyladenosine-3'-phosphate
  modified_base 16: mod_base = OTHER; note = 2'-fluoroguanosine-3'-phosphate
  modified_base 17: mod_base = OTHER; note = 2'-O-methylcytidine-3'-phosphate
  modified_base 18: mod_base = OTHER; note = 2'-O-methyladenosine-3'-phosphate
  modified_base 19: mod_base = OTHER; note = 2'-O-methylcytidine-3'-phosphate
  modified_base 20: mod_base = OTHER; note = 2'-O-methyladenosine-3'-phosphate
  modified_base 21: mod_base = OTHER; note = 2'-O-methylguanosine-3'-phosphorothioate
  modified_base 22: mod_base = OTHER; note = 2'-O-methyladenosine-3'-phosphorothioate
  modified_base 23: mod_base = OTHER; note = 2'-O-methyluridine-3'-phosphate
ttcagatgacgaagagcacagat

SEQ ID NO: 1823 - RNA, 23 nt, synthetic construct
  source 1..23: mol_type = other RNA
  modified_base 1: mod_base = OTHER; note Vinyl-phosphonate-2'-O-methyluridine-3'-phosphorothioate
  modified_base 2: mod_base = OTHER; note = 2'-fluoroguanosine-3'-phosphorothioate
  modified_base 3: mod_base = OTHER; note = 2'-O-methyluridine-3'-phosphate
  modified_base 4: mod_base = OTHER; note = 2'-O-methylcytidine-3'-phosphate
  modified_base 5: mod_base = OTHER; note = 2'-O-methyladenosine-3'-phosphate
  modified_base 6: mod_base = OTHER; note = 2'-fluoroguanosine-3'-phosphate
  modified_base 7: mod_base = OTHER; note = 2'-O-methyladenosine-3'-phosphate
  modified_base 8: mod_base = OTHER; note = 2'-fluorouridine-3'-phosphate
  modified_base 9: mod_base = OTHER; note = 2'-fluoroguanosine-3'-phosphate
  modified_base 10: mod_base = OTHER; note = 2'-O-methyladenosine-3'-phosphate
  modified_base 11: mod_base = OTHER; note = 2'-O-methylcytidine-3'-phosphate
  modified_base 12: mod_base = OTHER; note = 2'-O-methylguanosine-3'-phosphate
  modified_base 13: mod_base = OTHER; note = 2'-O-methyladenosine-3'-phosphate
  modified_base 14: mod_base = OTHER; note = 2'-fluoroadenosine-3'-phosphate
  modified_base 15: mod_base = OTHER; note = 2'-O-methylguanosine-3'-phosphate
  modified_base 16: mod_base = OTHER; note = 2'-fluoroadenosine-3'-phosphate
  modified_base 17: mod_base = OTHER; note = 2'-O-methylguanosine-3'-phosphate
  modified_base 18: mod_base = OTHER; note = 2'-O-methylcytidine-3'-phosphate
  modified_base 19: mod_base = OTHER; note = 2'-O-methyladenosine-3'-phosphate
  modified_base 20: mod_base = OTHER; note = 2'-O-methylcytidine-3'-phosphate
  modified_base 21: mod_base = OTHER; note = 2'-O-methyladenosine-3'-phosphorothioate
  modified_base 22: mod_base = OTHER; note = 2'-O-methylguanosine-3'-phosphorothioate
  modified_base 23: mod_base = OTHER; note = 2'-O-methyladenosine-3'-phosphate
tgtcagatgacgaagagcacaga

SEQ ID NO: 1824 - RNA, 23 nt, synthetic construct
  source 1..23: mol_type = other RNA
  modified_base 1: mod_base = OTHER; note Vinyl-phosphonate-2'-O-methyluridine-3'-phosphorothioate
  modified_base 2: mod_base = OTHER; note = 2'-fluoroguanosine-3'-phosphorothioate
  modified_base 3: mod_base = OTHER; note = 2'-O-methylguanosine-3'-phosphate
  modified_base 4: mod_base = OTHER; note = 2'-O-methyluridine-3'-phosphate
  modified_base 5: mod_base = OTHER; note = 2'-O-methylcytidine-3'-phosphate
  modified_base 6: mod_base = OTHER; note = 2'-fluoroadenosine-3'-phosphate
  modified_base 7: mod_base = OTHER; note = 2'-O-methylguanosine-3'-phosphate
  modified_base 8: mod_base = OTHER; note = 2'-fluoroadenosine-3'-phosphate
  modified_base 9: mod_base = OTHER; note = 2'-fluorouridine-3'-phosphate
  modified_base 10: mod_base = OTHER; note = 2'-O-methylguanosine-3'-phosphate
  modified_base 11: mod_base = OTHER; note = 2'-O-methyladenosine-3'-phosphate
  modified_base 12: mod_base = OTHER; note = 2'-O-methylcytidine-3'-phosphate
  modified_base 13: mod_base = OTHER; note = 2'-O-methylguanosine-3'-phosphate
  modified_base 14: mod_base = OTHER; note = 2'-fluoroadenosine-3'-phosphate
  modified_base 15: mod_base = OTHER; note = 2'-O-methyladenosine-3'-phosphate
  modified_base 16: mod_base = OTHER; note = 2'-fluoroguanosine-3'-phosphate
  modified_base 17: mod_base = OTHER; note = 2'-O-methyladenosine-3'-phosphate
  modified_base 18: mod_base = OTHER; note = 2'-O-methylguanosine-3'-phosphate
  modified_base 19: mod_base = OTHER; note = 2'-O-methylcytidine-3'-phosphate
  modified_base 20: mod_base = OTHER; note = 2'-O-methyladenosine-3'-phosphate
  modified_base 21: mod_base = OTHER; note = 2'-O-methylcytidine-3'-phosphorothioate
  modified_base 22: mod_base = OTHER; note = 2'-O-methyladenosine-3'-phosphorothioate
  modified_base 23: mod_base = OTHER; note = 2'-O-methylguanosine-3'-phosphate
tggtcagatgacgaagagcacag

SEQ ID NO: 1825 - RNA, 23 nt, synthetic construct
  source 1..23: mol_type = other RNA
  modified_base 1: mod_base = OTHER; note Vinyl-phosphonate-2'-O-methyluridine-3'-phosphorothioate
  modified_base 2: mod_base = OTHER; note = 2'-fluorouridine -3'-phosphorothioate
  modified_base 3: mod_base = OTHER; note = 2'-O-methyluridine-3'-phosphate
  modified_base 4: mod_base = OTHER; note = 2'-O-methyluridine-3'-phosphate
  modified_base 5: mod_base = OTHER; note = 2'-O-methylcytidine-3'-phosphate
  modified_base 6: mod_base = OTHER; note = 2'-fluoroguanosine-3'-phosphate
  modified_base 7: mod_base = OTHER; note = 2'-O-methyladenosine-3'-phosphate
  modified_base 8: mod_base = OTHER; note = 2'-fluoroadenosine-3'-phosphate
  modified_base 9: mod_base = OTHER; note = 2'-fluorouridine-3'-phosphate
  modified_base 10: mod_base = OTHER; note = 2'-O-methylcytidine-3'-phosphate
  modified_base 11: mod_base = OTHER; note = 2'-O-methyladenosine-3'-phosphate
  modified_base 12: mod_base = OTHER; note = 2'-O-methyladenosine-3'-phosphate
  modified_base 13: mod_base = OTHER; note = 2'-O-methyluridine-3'-phosphate
  modified_base 14: mod_base = OTHER; note = 2'-fluorocytidine-3'-phosphate
  modified_base 15: mod_base = OTHER; note = 2'-O-methylcytidine-3'-phosphate
  modified_base 16: mod_base = OTHER; note = 2'-fluoroadenosine-3'-phosphate
  modified_base 17: mod_base = OTHER; note = 2'-O-methyladenosine-3'-phosphate
  modified_base 18: mod_base = OTHER; note = 2'-O-methylcytidine-3'-phosphate
  modified_base 19: mod_base = OTHER; note = 2'-O-methyladenosine-3'-phosphate
  modified_base 20: mod_base = OTHER; note = 2'-O-methylguanosine-3'-phosphate
  modified_base 21: mod_base = OTHER; note = 2'-O-methyluridine-3'-phosphorothioate
  modified_base 22: mod_base = OTHER; note = 2'-O-methyladenosine-3'-phosphorothioate
  modified_base 23: mod_base = OTHER; note = 2'-O-methylguanosine-3'-phosphate
ttttcgaatcaatccaacagtag

SEQ ID NO: 1826 - RNA, 23 nt, synthetic construct
  source 1..23: mol_type = other RNA
  modified_base 1: mod_base = OTHER; note Vinyl-phosphonate-2'-O-methyluridine-3'-phosphorothioate
  modified_base 2: mod_base = OTHER; note = 2'-fluorocytidine-3'-phosphorothioate
  modified_base 3: mod_base = OTHER; note = 2'-O-methyladenosine-3'-phosphate
  modified_base 4: mod_base = OTHER; note = 2'-O-methyladenosine-3'-phosphate
  modified_base 5: mod_base = OTHER; note = 2'-O-methyladenosine-3'-phosphate
  modified_base 6: mod_base = OTHER; note = 2'-fluorocytidine-3'-phosphate
  modified_base 7: mod_base = OTHER; note = 2'-O-methyladenosine-3'-phosphate
  modified_base 8: mod_base = OTHER; note = 2'-fluoroadenosine-3'-phosphate
  modified_base 9: mod_base = OTHER; note = 2'-fluorouridine-3'-phosphate
  modified_base 10: mod_base = OTHER; note = 2'-O-methylguanosine-3'-phosphate
  modified_base 11: mod_base = OTHER; note = 2'-O-methylguanosine-3'-phosphate
  modified_base 12: mod_base = OTHER; note = 2'-O-methyladenosine-3'-phosphate
  modified_base 13: mod_base = OTHER; note = 2'-O-methyladenosine-3'-phosphate
  modified_base 14: mod_base = OTHER; note = 2'-fluorouridine-3'-phosphate
  modified_base 15: mod_base = OTHER; note = 2'-O-methylguanosine-3'-phosphate
  modified_base 16: mod_base = OTHER; note = 2'-fluoroguanosine-3'-phosphate
  modified_base 17: mod_base = OTHER; note = 2'-O-methyluridine-3'-phosphate
  modified_base 18: mod_base = OTHER; note = 2'-O-methyladenosine-3'-phosphate
  modified_base 19: mod_base = OTHER; note = 2'-O-methyluridine-3'-phosphate
  modified_base 20: mod_base = OTHER; note = 2'-O-methyluridine-3'-phosphate
  modified_base 21: mod_base = OTHER; note = 2'-O-methyluridine-3'-phosphorothioate
  modified_base 22: mod_base = OTHER; note = 2'-O-methyladenosine-3'-phosphorothioate
  modified_base 23: mod_base = OTHER; note = 2'-O-methylguanosine-3'-phosphate
tcaaacaatggaatggtatttag

SEQ ID NO: 1827 - RNA, 23 nt, synthetic construct
  source 1..23: mol_type = other RNA
  modified_base 1: mod_base = OTHER; note Vinyl-phosphonate-2'-O-methyluridine-3'-phosphorothioate
  modified_base 2: mod_base = OTHER; note = 2'-fluoroguanosine-3'-phosphorothioate
  modified_base 3: mod_base = OTHER; note = 2'-O-methylcytidine-3'-phosphate
  modified_base 4: mod_base = OTHER; note = 2'-O-methyladenosine-3'-phosphate
  modified_base 5: mod_base = OTHER; note = 2'-O-methylcytidine-3'-phosphate
  modified_base 6: mod_base = OTHER; note = 2'-fluoroadenosine-3'-phosphate
  modified_base 7: mod_base = OTHER; note = 2'-O-methyladenosine-3'-phosphate
  modified_base 8: mod_base = OTHER; note = 2'-fluoroadenosine-3'-phosphate
  modified_base 9: mod_base = OTHER; note = 2'-fluorocytidine-3'-phosphate
  modified_base 10: mod_base = OTHER; note = 2'-O-methyladenosine-3'-phosphate
  modified_base 11: mod_base = OTHER; note = 2'-O-methyladenosine-3'-phosphate
  modified_base 12: mod_base = OTHER; note = 2'-O-methyluridine-3'-phosphate
  modified_base 13: mod_base = OTHER; note = 2'-O-methylguanosine-3'-phosphate
  modified_base 14: mod_base = OTHER; note = 2'-fluoroguanosine-3'-phosphate
  modified_base 15: mod_base = OTHER; note = 2'-O-methyladenosine-3'-phosphate
  modified_base 16: mod_base = OTHER; note = 2'-fluoroadenosine-3'-phosphate
  modified_base 17: mod_base = OTHER; note = 2'-O-methyluridine-3'-phosphate
  modified_base 18: mod_base = OTHER; note = 2'-O-methylguanosine-3'-phosphate
  modified_base 19: mod_base = OTHER; note = 2'-O-methylguanosine-3'-phosphate
  modified_base 20: mod_base = OTHER; note = 2'-O-methyluridine-3'-phosphate
  modified_base 21: mod_base = OTHER; note = 2'-O-methyladenosine-3'-phosphorothioate
  modified_base 22: mod_base = OTHER; note = 2'-O-methyluridine-3'-phosphorothioate
  modified_base 23: mod_base = OTHER; note = 2'-O-methyluridine-3'-phosphate
tgcacaaacaatggaatggtatt

SEQ ID NO: 1828 - RNA, 23 nt, synthetic construct
  source 1..23: mol_type = other RNA
  modified_base 1: mod_base = OTHER; note Vinyl-phosphonate-2'-O-methyluridine-3'-phosphorothioate
  modified_base 2: mod_base = OTHER; note = 2'-fluorocytidine-3'-phosphorothioate
  modified_base 3: mod_base = OTHER; note = 2'-O-methyluridine-3'-phosphate
  modified_base 4: mod_base = OTHER; note = 2'-O-methylguanosine-3'-phosphate
  modified_base 5: mod_base = OTHER; note = 2'-O-methylcytidine-3'-phosphate
  modified_base 6: mod_base = OTHER; note = 2'-fluoroadenosine-3'-phosphate
  modified_base 7: mod_base = OTHER; note = 2'-O-methylcytidine-3'-phosphate
  modified_base 8: mod_base = OTHER; note = 2'-fluoroadenosine-3'-phosphate
  modified_base 9: mod_base = OTHER; note = 2'-fluoroadenosine-3'-phosphate
  modified_base 10: mod_base = OTHER; note = 2'-O-methyladenosine-3'-phosphate
  modified_base 11: mod_base = OTHER; note = 2'-O-methylcytidine-3'-phosphate
  modified_base 12: mod_base = OTHER; note = 2'-O-methyladenosine-3'-phosphate
  modified_base 13: mod_base = OTHER; note = 2'-O-methyladenosine-3'-phosphate
  modified_base 14: mod_base = OTHER; note = 2'-fluorouridine-3'-phosphate
  modified_base 15: mod_base = OTHER; note = 2'-O-methylguanosine-3'-phosphate
  modified_base 16: mod_base = OTHER; note = 2'-fluoroguanosine-3'-phosphate
  modified_base 17: mod_base = OTHER; note = 2'-O-methyladenosine-3'-phosphate
  modified_base 18: mod_base = OTHER; note = 2'-O-methyladenosine-3'-phosphate
  modified_base 19: mod_base = OTHER; note = 2'-O-methyluridine-3'-phosphate
  modified_base 20: mod_base = OTHER; note = 2'-O-methylguanosine-3'-phosphate
  modified_base 21: mod_base = OTHER; note = 2'-O-methylguanosine-3'-phosphorothioate
  modified_base 22: mod_base = OTHER; note = 2'-O-methyluridine-3'-phosphorothioate
  modified_base 23: mod_base = OTHER; note = 2'-O-methyladenosine-3'-phosphate
tctgcacaaacaatggaatggta

SEQ ID NO: 1829 - RNA, 23 nt, synthetic construct
  source 1..23: mol_type = other RNA
  modified_base 1: mod_base = OTHER; note Vinyl-phosphonate-2'-O-methyluridine-3'-phosphorothioate
  modified_base 2: mod_base = OTHER; note = 2'-fluorouridine -3'-phosphorothioate
  modified_base 3: mod_base = OTHER; note = 2'-O-methylguanosine-3'-phosphate
  modified_base 4: mod_base = OTHER; note = 2'-O-methyladenosine-3'-phosphate
  modified_base 5: mod_base = OTHER; note = 2'-O-methylguanosine-3'-phosphate
  modified_base 6: mod_base = OTHER; note = 2'-fluorocytidine-3'-phosphate
  modified_base 7: mod_base = OTHER; note = 2'-O-methyladenosine-3'-phosphate
  modified_base 8: mod_base = OTHER; note = 2'-fluoroadenosine-3'-phosphate
  modified_base 9: mod_base = OTHER; note = 2'-fluoroguanosine-3'-phosphate
  modified_base 10: mod_base = OTHER; note = 2'-O-methyluridine-3'-phosphate
  modified_base 11: mod_base = OTHER; note = 2'-O-methyluridine-3'-phosphate
  modified_base 12: mod_base = OTHER; note = 2'-O-methylcytidine-3'-phosphate
  modified_base 13: mod_base = OTHER; note = 2'-O-methyladenosine-3'-phosphate
  modified_base 14: mod_base = OTHER; note = 2'-fluorocytidine-3'-phosphate
  modified_base 15: mod_base = OTHER; note = 2'-O-methyladenosine-3'-phosphate
  modified_base 16: mod_base = OTHER; note = 2'-fluoroguanosine-3'-phosphate
  modified_base 17: mod_base = OTHER; note = 2'-O-methyladenosine-3'-phosphate
  modified_base 18: mod_base = OTHER; note = 2'-O-methylguanosine-3'-phosphate
  modified_base 19: mod_base = OTHER; note = 2'-O-methylguanosine-3'-phosphate
  modified_base 20: mod_base = OTHER; note = 2'-O-methyladenosine-3'-phosphate
  modified_base 21: mod_base = OTHER; note = 2'-O-methylcytidine-3'-phosphorothioate
  modified_base 22: mod_base = OTHER; note = 2'-O-methylcytidine-3'-phosphorothioate
  modified_base 23: mod_base = OTHER; note = 2'-O-methylcytidine-3'-phosphate
ttgagcaagttcacagaggaccc

SEQ ID NO: 1830 - RNA, 23 nt, synthetic construct
  source 1..23: mol_type = other RNA
  modified_base 1: mod_base = OTHER; note Vinyl-phosphonate-2'-O-methyluridine-3'-phosphorothioate
  modified_base 2: mod_base = OTHER; note = 2'-fluorocytidine-3'-phosphorothioate
  modified_base 3: mod_base = OTHER; note = 2'-O-methyluridine-3'-phosphate
  modified_base 4: mod_base = OTHER; note = 2'-O-methylguanosine-3'-phosphate
  modified_base 5: mod_base = OTHER; note = 2'-O-methyladenosine-3'-phosphate
  modified_base 6: mod_base = OTHER; note = 2'-fluoroguanosine-3'-phosphate
  modified_base 7: mod_base = OTHER; note = 2'-O-methylcytidine-3'-phosphate
  modified_base 8: mod_base = OTHER; note = 2'-fluoroadenosine-3'-phosphate
  modified_base 9: mod_base = OTHER; note = 2'-fluoroadenosine-3'-phosphate
  modified_base 10: mod_base = OTHER; note = 2'-O-methylguanosine-3'-phosphate
  modified_base 11: mod_base = OTHER; note = 2'-O-methyluridine-3'-phosphate
  modified_base 12: mod_base = OTHER; note = 2'-O-methyluridine-3'-phosphate
  modified_base 13: mod_base = OTHER; note = 2'-O-methylcytidine-3'-phosphate
  modified_base 14: mod_base = OTHER; note = 2'-fluoroadenosine-3'-phosphate
  modified_base 15: mod_base = OTHER; note = 2'-O-methylcytidine-3'-phosphate
  modified_base 16: mod_base = OTHER; note = 2'-fluoroadenosine-3'-phosphate
  modified_base 17: mod_base = OTHER; note = 2'-O-methylguanosine-3'-phosphate
  modified_base 18: mod_base = OTHER; note = 2'-O-methyladenosine-3'-phosphate
  modified_base 19: mod_base = OTHER; note = 2'-O-methylguanosine-3'-phosphate
  modified_base 20: mod_base = OTHER; note = 2'-O-methylguanosine-3'-phosphate
  modified_base 21: mod_base = OTHER; note = 2'-O-methyladenosine-3'-phosphorothioate
  modified_base 22: mod_base = OTHER; note = 2'-O-methylcytidine-3'-phosphorothioate
  modified_base 23: mod_base = OTHER; note = 2'-O-methylcytidine-3'-phosphate
tctgagcaagttcacagaggacc

SEQ ID NO: 1831 - RNA, 23 nt, synthetic construct
  source 1..23: mol_type = other RNA
  modified_base 1: mod_base = OTHER; note Vinyl-phosphonate-2'-O-methyluridine-3'-phosphorothioate
  modified_base 2: mod_base = OTHER; note = 2'-fluoroadenosine-3'-phosphorothioate
  modified_base 3: mod_base = OTHER; note = 2'-O-methylcytidine-3'-phosphate
  modified_base 4: mod_base = OTHER; note = 2'-O-methylcytidine-3'-phosphate
  modified_base 5: mod_base = OTHER; note = 2'-O-methyladenosine-3'-phosphate
  modified_base 6: mod_base = OTHER; note = 2'-fluoroguanosine-3'-phosphate
  modified_base 7: mod_base = OTHER; note = 2'-O-methyladenosine-3'-phosphate
  modified_base 8: mod_base = OTHER; note = 2'-fluoroguanosine-3'-phosphate
  modified_base 9: mod_base = OTHER; note = 2'-fluorouridine-3'-phosphate
  modified_base 10: mod_base = OTHER; note = 2'-O-methylguanosine-3'-phosphate
  modified_base 11: mod_base = OTHER; note = 2'-O-methyladenosine-3'-phosphate
  modified_base 12: mod_base = OTHER; note = 2'-O-methyladenosine-3'-phosphate
  modified_base 13: mod_base = OTHER; note = 2'-O-methyladenosine-3'-phosphate
  modified_base 14: mod_base = OTHER; note = 2'-fluoroadenosine-3'-phosphate
  modified_base 15: mod_base = OTHER; note = 2'-O-methylguanosine-3'-phosphate
  modified_base 16: mod_base = OTHER; note = 2'-fluoroadenosine-3'-phosphate
  modified_base 17: mod_base = OTHER; note = 2'-O-methyladenosine-3'-phosphate
  modified_base 18: mod_base = OTHER; note = 2'-O-methylcytidine-3'-phosphate
  modified_base 19: mod_base = OTHER; note = 2'-O-methylguanosine-3'-phosphate
  modified_base 20: mod_base = OTHER; note = 2'-O-methyladenosine-3'-phosphate
  modified_base 21: mod_base = OTHER; note = 2'-O-methyluridine-3'-phosphorothioate
  modified_base 22: mod_base = OTHER; note = 2'-O-methyladenosine-3'-phosphorothioate
  modified_base 23: mod_base = OTHER; note = 2'-O-methylguanosine-3'-phosphate
taccagagtgaaaagaacgatag

SEQ ID NO: 1832 - RNA, 23 nt, synthetic construct
  source 1..23: mol_type = other RNA
  modified_base 1: mod_base = OTHER; note Vinyl-phosphonate-2'-O-methyluridine-3'-phosphorothioate
  modified_base 2: mod_base = OTHER; note = 2'-fluorocytidine-3'-phosphorothioate
  modified_base 3: mod_base = OTHER; note = 2'-O-methyladenosine-3'-phosphate
  modified_base 4: mod_base = OTHER; note = 2'-O-methylcytidine-3'-phosphate
  modified_base 5: mod_base = OTHER; note = 2'-O-methylcytidine-3'-phosphate
  modified_base 6: mod_base = OTHER; note = 2'-fluoroadenosine-3'-phosphate
  modified_base 7: mod_base = OTHER; note = 2'-O-methylguanosine-3'-phosphate
  modified_base 8: mod_base = OTHER; note = 2'-fluoroadenosine-3'-phosphate
  modified_base 9: mod_base = OTHER; note = 2'-fluoroguanosine-3'-phosphate
  modified_base 10: mod_base = OTHER; note = 2'-O-methyluridine-3'-phosphate
  modified_base 11: mod_base = OTHER; note = 2'-O-methylguanosine-3'-phosphate
  modified_base 12: mod_base = OTHER; note = 2'-O-methyladenosine-3'-phosphate
  modified_base 13: mod_base = OTHER; note = 2'-O-methyladenosine-3'-phosphate
  modified_base 14: mod_base = OTHER; note = 2'-fluoroadenosine-3'-phosphate
  modified_base 15: mod_base = OTHER; note = 2'-O-methyladenosine-3'-phosphate
  modified_base 16: mod_base = OTHER; note = 2'-fluoroguanosine-3'-phosphate
  modified_base 17: mod_base = OTHER; note = 2'-O-methyladenosine-3'-phosphate
  modified_base 18: mod_base = OTHER; note = 2'-O-methyladenosine-3'-phosphate
  modified_base 19: mod_base = OTHER; note = 2'-O-methylcytidine-3'-phosphate
  modified_base 20: mod_base = OTHER; note = 2'-O-methylguanosine-3'-phosphate
  modified_base 21: mod_base = OTHER; note = 2'-O-methyladenosine-3'-phosphorothioate
  modified_base 22: mod_base = OTHER; note = 2'-O-methyluridine-3'-phosphorothioate
  modified_base 23: mod_base = OTHER; note = 2'-O-methyladenosine-3'-phosphate
tcaccagagtgaaaagaacgata

SEQ ID NO: 1833 - RNA, 23 nt, synthetic construct
  source 1..23: mol_type = other RNA
  modified_base 1: mod_base = OTHER; note Vinyl-phosphonate-2'-O-methyluridine-3'-phosphorothioate
  modified_base 2: mod_base = OTHER; note = 2'-fluorocytidine-3'-phosphorothioate
  modified_base 3: mod_base = OTHER; note = 2'-O-methyladenosine-3'-phosphate
  modified_base 4: mod_base = OTHER; note = 2'-O-methyladenosine-3'-phosphate
  modified_base 5: mod_base = OTHER; note = 2'-O-methylcytidine-3'-phosphate
  modified_base 6: mod_base = OTHER; note = 2'-fluorouridine-3'-phosphate
  modified_base 7: mod_base = OTHER; note = 2'-O-methylguanosine-3'-phosphate
  modified_base 8: mod_base = OTHER; note = 2'-fluoroguanosine-3'-phosphate
  modified_base 9: mod_base = OTHER; note = 2'-fluoroadenosine-3'-phosphate
  modified_base 10: mod_base = OTHER; note = 2'-O-methyluridine-3'-phosphate
  modified_base 11: mod_base = OTHER; note = 2'-O-methyladenosine-3'-phosphate
  modified_base 12: mod_base = OTHER; note = 2'-O-methylguanosine-3'-phosphate
  modified_base 13: mod_base = OTHER; note = 2'-O-methyluridine-3'-phosphate
  modified_base 14: mod_base = OTHER; note = 2'-fluorocytidine-3'-phosphate
  modified_base 15: mod_base = OTHER; note = 2'-O-methyladenosine-3'-phosphate
  modified_base 16: mod_base = OTHER; note = 2'-fluoroguanosine-3'-phosphate
  modified_base 17: mod_base = OTHER; note = 2'-O-methylcytidine-3'-phosphate
  modified_base 18: mod_base = OTHER; note = 2'-O-methyladenosine-3'-phosphate
  modified_base 19: mod_base = OTHER; note = 2'-O-methylcytidine-3'-phosphate
  modified_base 20: mod_base = OTHER; note = 2'-O-methylcytidine-3'-phosphate
  modified_base 21: mod_base = OTHER; note = 2'-O-methyladenosine-3'-phosphorothioate
  modified_base 22: mod_base = OTHER; note = 2'-O-methylguanosine-3'-phosphorothioate
  modified_base 23: mod_base = OTHER; note = 2'-O-methylguanosine-3'-phosphate
tcaactggatagtcagcaccagg

SEQ ID NO: 1834 - RNA, 23 nt, synthetic construct
  source 1..23: mol_type = other RNA
  modified_base 1: mod_base = OTHER; note Vinyl-phosphonate-2'-O-methyluridine-3'-phosphorothioate
  modified_base 2: mod_base = OTHER; note = 2'-fluorocytidine-3'-phosphorothioate
  modified_base 3: mod_base = OTHER; note = 2'-O-methylcytidine-3'-phosphate
  modified_base 4: mod_base = OTHER; note = 2'-O-methyladenosine-3'-phosphate
  modified_base 5: mod_base = OTHER; note = 2'-O-methyluridine-3'-phosphate
  modified_base 6: mod_base = OTHER; note = 2'-fluorocytidine-3'-phosphate
  modified_base 7: mod_base = OTHER; note = 2'-O-methyladenosine-3'-phosphate
  modified_base 8: mod_base = OTHER; note = 2'-fluoroadenosine-3'-phosphate
  modified_base 9: mod_base = OTHER; note = 2'-fluorocytidine-3'-phosphate
  modified_base 10: mod_base = OTHER; note = 2'-O-methyluridine-3'-phosphate
  modified_base 11: mod_base = OTHER; note = 2'-O-methylguanosine-3'-phosphate
  modified_base 12: mod_base = OTHER; note = 2'-O-methylguanosine-3'-phosphate
  modified_base 13: mod_base = OTHER; note = 2'-O-methyladenosine-3'-phosphate
  modified_base 14: mod_base = OTHER; note = 2'-fluorouridine-3'-phosphate
  modified_base 15: mod_base = OTHER; note = 2'-O-methyladenosine-3'-phosphate
  modified_base 16: mod_base = OTHER; note = 2'-fluoroguanosine-3'-phosphate
  modified_base 17: mod_base = OTHER; note = 2'-O-methyluridine-3'-phosphate
  modified_base 18: mod_base = OTHER; note = 2'-O-methylcytidine-3'-phosphate
  modified_base 19: mod_base = OTHER; note = 2'-O-methyladenosine-3'-phosphate
  modified_base 20: mod_base = OTHER; note = 2'-O-methylguanosine-3'-phosphate
  modified_base 21: mod_base = OTHER; note = 2'-O-methylcytidine-3'-phosphorothioate
  modified_base 22: mod_base = OTHER; note = 2'-O-methyladenosine-3'-phosphorothioate
  modified_base 23: mod_base = OTHER; note = 2'-O-methylcytidine-3'-phosphate
tccatcaactggatagtcagcac

SEQ ID NO: 1835 - RNA, 23 nt, synthetic construct
  source 1..23: mol_type = other RNA
  modified_base 1: mod_base = OTHER; note Vinyl-phosphonate-2'-O-methyluridine-3'-phosphorothioate
  modified_base 2: mod_base = OTHER; note = 2'-fluorocytidine-3'-phosphorothioate
  modified_base 3: mod_base = OTHER; note = 2'-O-methylcytidine-3'-phosphate
  modified_base 4: mod_base = OTHER; note = 2'-O-methylcytidine-3'-phosphate
  modified_base 5: mod_base = OTHER; note = 2'-O-methyladenosine-3'-phosphate
  modified_base 6: mod_base = OTHER; note = 2'-fluorouridine-3'-phosphate
  modified_base 7: mod_base = OTHER; note = 2'-O-methylcytidine-3'-phosphate
  modified_base 8: mod_base = OTHER; note = 2'-fluoroadenosine-3'-phosphate
  modified_base 9: mod_base = OTHER; note = 2'-fluoroadenosine-3'-phosphate
  modified_base 10: mod_base = OTHER; note = 2'-O-methylcytidine-3'-phosphate
  modified_base 11: mod_base = OTHER; note = 2'-O-methyluridine-3'-phosphate
  modified_base 12: mod_base = OTHER; note = 2'-O-methylguanosine-3'-phosphate
  modified_base 13: mod_base = OTHER; note = 2'-O-methylguanosine-3'-phosphate
  modified_base 14: mod_base = OTHER; note = 2'-fluoroadenosine-3'-phosphate
  modified_base 15: mod_base = OTHER; note = 2'-O-methyluridine-3'-phosphate
  modified_base 16: mod_base = OTHER; note = 2'-fluoroadenosine-3'-phosphate
  modified_base 17: mod_base = OTHER; note = 2'-O-methylguanosine-3'-phosphate
  modified_base 18: mod_base = OTHER; note = 2'-O-methyluridine-3'-phosphate
  modified_base 19: mod_base = OTHER; note = 2'-O-methylcytidine-3'-phosphate
  modified_base 20: mod_base = OTHER; note = 2'-O-methyladenosine-3'-phosphate
  modified_base 21: mod_base = OTHER; note = 2'-O-methylguanosine-3'-phosphorothioate
  modified_base 22: mod_base = OTHER; note = 2'-O-methylcytidine-3'-phosphorothioate
  modified_base 23: mod_base = OTHER; note = 2'-O-methyladenosine-3'-phosphate
tcccatcaactggatagtcagca

SEQ ID NO: 1836 - RNA, 23 nt, synthetic construct
  source 1..23: mol_type = other RNA
  modified_base 1: mod_base = OTHER; note Vinyl-phosphonate-2'-O-methyluridine-3'-phosphorothioate
  modified_base 2: mod_base = OTHER; note = 2'-fluoroadenosine-3'-phosphorothioate
  modified_base 3: mod_base = OTHER; note = 2'-O-methylguanosine-3'-phosphate
  modified_base 4: mod_base = OTHER; note = 2'-O-methylcytidine-3'-phosphate
  modified_base 5: mod_base = OTHER; note = 2'-O-methylcytidine-3'-phosphate
  modified_base 6: mod_base = OTHER; note = 2'-fluorocytidine-3'-phosphate
  modified_base 7: mod_base = OTHER; note = 2'-O-methyladenosine-3'-phosphate
  modified_base 8: mod_base = OTHER; note = 2'-fluorouridine-3'-phosphate
  modified_base 9: mod_base = OTHER; note = 2'-fluorocytidine-3'-phosphate
  modified_base 10: mod_base = OTHER; note = 2'-O-methyladenosine-3'-phosphate
  modified_base 11: mod_base = OTHER; note = 2'-O-methyladenosine-3'-phosphate
  modified_base 12: mod_base = OTHER; note = 2'-O-methylcytidine-3'-phosphate
  modified_base 13: mod_base = OTHER; note = 2'-O-methyluridine-3'-phosphate
  modified_base 14: mod_base = OTHER; note = 2'-fluoroguanosine-3'-phosphate
  modified_base 15: mod_base = OTHER; note = 2'-O-methylguanosine-3'-phosphate
  modified_base 16: mod_base = OTHER; note = 2'-fluoroadenosine-3'-phosphate
  modified_base 17: mod_base = OTHER; note = 2'-O-methyluridine-3'-phosphate
  modified_base 18: mod_base = OTHER; note = 2'-O-methyladenosine-3'-phosphate
  modified_base 19: mod_base = OTHER; note = 2'-O-methylguanosine-3'-phosphate
  modified_base 20: mod_base = OTHER; note = 2'-O-methyluridine-3'-phosphate
  modified_base 21: mod_base = OTHER; note = 2'-O-methylcytidine-3'-phosphorothioate
  modified_base 22: mod_base = OTHER; note = 2'-O-methyladenosine-3'-phosphorothioate
  modified_base 23: mod_base = OTHER; note = 2'-O-methylguanosine-3'-phosphate
tagcccatcaactggatagtcag

SEQ ID NO: 1837 - RNA, 23 nt, synthetic construct
  source 1..23: mol_type = other RNA
  modified_base 1: mod_base = OTHER; note Vinyl-phosphonate-2'-O-methyluridine-3'-phosphorothioate
  modified_base 2: mod_base = OTHER; note = 2'-fluorocytidine-3'-phosphorothioate
  modified_base 3: mod_base = OTHER; note = 2'-O-methyladenosine-3'-phosphate
  modified_base 4: mod_base = OTHER; note = 2'-O-methylguanosine-3'-phosphate
  modified_base 5: mod_base = OTHER; note = 2'-O-methylcytidine-3'-phosphate
  modified_base 6: mod_base = OTHER; note = 2'-fluoroadenosine-3'-phosphate
  modified_base 7: mod_base = OTHER; note = 2'-O-methyladenosine-3'-phosphate
  modified_base 8: mod_base = OTHER; note = 2'-fluorocytidine-3'-phosphate
  modified_base 9: mod_base = OTHER; note = 2'-fluorouridine-3'-phosphate
  modified_base 10: mod_base = OTHER; note = 2'-O-methylcytidine-3'-phosphate
  modified_base 11: mod_base = OTHER; note = 2'-O-methyluridine-3'-phosphate
  modified_base 12: mod_base = OTHER; note = 2'-O-methyladenosine-3'-phosphate
  modified_base 13: mod_base = OTHER; note = 2'-O-methylcytidine-3'-phosphate
  modified_base 14: mod_base = OTHER; note = 2'-fluoroadenosine-3'-phosphate
  modified_base 15: mod_base = OTHER; note = 2'-O-methylguanosine-3'-phosphate
  modified_base 16: mod_base = OTHER; note = 2'-fluoroguanosine-3'-phosphate
  modified_base 17: mod_base = OTHER; note = 2'-O-methylcytidine-3'-phosphate
  modified_base 18: mod_base = OTHER; note = 2'-O-methylcytidine-3'-phosphate
  modified_base 19: mod_base = OTHER; note = 2'-O-methyladenosine-3'-phosphate
  modified_base 20: mod_base = OTHER; note = 2'-O-methyladenosine-3'-phosphate
  modified_base 21: mod_base = OTHER; note = 2'-O-methyluridine-3'-phosphorothioate
  modified_base 22: mod_base = OTHER; note = 2'-O-methylcytidine-3'-phosphorothioate
  modified_base 23: mod_base = OTHER; note = 2'-O-methyladenosine-3'-phosphate
tcagcaactctacaggccaatca

SEQ ID NO: 1838 - RNA, 23 nt, synthetic construct
  source 1..23: mol_type = other RNA
  modified_base 1: mod_base = OTHER; note Vinyl-phosphonate-2'-O-methyluridine-3'-phosphorothioate
  modified_base 2: mod_base = OTHER; note = 2'-fluorocytidine-3'-phosphorothioate
  modified_base 3: mod_base = OTHER; note = 2'-O-methyladenosine-3'-phosphate
  modified_base 4: mod_base = OTHER; note = 2'-O-methylcytidine-3'-phosphate
  modified_base 5: mod_base = OTHER; note = 2'-O-methyluridine-3'-phosphate
  modified_base 6: mod_base = OTHER; note = 2'-fluorouridine-3'-phosphate
  modified_base 7: mod_base = OTHER; note = 2'-O-methyluridine-3'-phosphate
  modified_base 8: mod_base = OTHER; note = 2'-fluorocytidine-3'-phosphate
  modified_base 9: mod_base = OTHER; note = 2'-fluorouridine-3'-phosphate
  modified_base 10: mod_base = OTHER; note = 2'-O-methylguanosine-3'-phosphate
  modified_base 11: mod_base = OTHER; note = 2'-O-methyladenosine-3'-phosphate
  modified_base 12: mod_base = OTHER; note = 2'-O-methylguanosine-3'-phosphate
  modified_base 13: mod_base = OTHER; note = 2'-O-methyladenosine-3'-phosphate
  modified_base 14: mod_base = OTHER; note = 2'-fluorouridine-3'-phosphate
  modified_base 15: mod_base = OTHER; note = 2'-O-methyladenosine-3'-phosphate
  modified_base 16: mod_base = OTHER; note = 2'-fluorocytidine-3'-phosphate
  modified_base 17: mod_base = OTHER; note = 2'-O-methylcytidine-3'-phosphate
  modified_base 18: mod_base = OTHER; note = 2'-O-methyladenosine-3'-phosphate
  modified_base 19: mod_base = OTHER; note = 2'-O-methylguanosine-3'-phosphate
  modified_base 20: mod_base = OTHER; note = 2'-O-methylcytidine-3'-phosphate
  modified_base 21: mod_base = OTHER; note = 2'-O-methylcytidine-3'-phosphorothioate
  modified_base 22: mod_base = OTHER; note = 2'-O-methylcytidine-3'-phosphorothioate
  modified_base 23: mod_base = OTHER; note = 2'-O-methyladenosine-3'-phosphate
tcactttctgagataccagccca

SEQ ID NO: 1839 - RNA, 23 nt, synthetic construct
  source 1..23: mol_type = other RNA
  modified_base 1: mod_base = OTHER; note Vinyl-phosphonate-2'-O-methyluridine-3'-phosphorothioate
  modified_base 2: mod_base = OTHER; note = 2'-fluoroguanosine-3'-phosphorothioate
  modified_base 3: mod_base = OTHER; note = 2'-O-methylcytidine-3'-phosphate
  modified_base 4: mod_base = OTHER; note = 2'-O-methyladenosine-3'-phosphate
  modified_base 5: mod_base = OTHER; note = 2'-O-methylcytidine-3'-phosphate
  modified_base 6: mod_base = OTHER; note = 2'-fluorouridine-3'-phosphate
  modified_base 7: mod_base = OTHER; note = 2'-O-methyluridine-3'-phosphate
  modified_base 8: mod_base = OTHER; note = 2'-fluorouridine-3'-phosphate
  modified_base 9: mod_base = OTHER; note = 2'-fluorocytidine-3'-phosphate
  modified_base 10: mod_base = OTHER; note = 2'-O-methyluridine-3'-phosphate
  modified_base 11: mod_base = OTHER; note = 2'-O-methylguanosine-3'-phosphate
  modified_base 12: mod_base = OTHER; note = 2'-O-methyladenosine-3'-phosphate
  modified_base 13: mod_base = OTHER; note = 2'-O-methylguanosine-3'-phosphate
  modified_base 14: mod_base = OTHER; note = 2'-fluoroadenosine-3'-phosphate
  modified_base 15: mod_base = OTHER; note = 2'-O-methyluridine-3'-phosphate
  modified_base 16: mod_base = OTHER; note = 2'-fluoroadenosine-3'-phosphate
  modified_base 17: mod_base = OTHER; note = 2'-O-methylcytidine-3'-phosphate
  modified_base 18: mod_base = OTHER; note = 2'-O-methylcytidine-3'-phosphate
  modified_base 19: mod_base = OTHER; note = 2'-O-methyladenosine-3'-phosphate
  modified_base 20: mod_base = OTHER; note = 2'-O-methylguanosine-3'-phosphate
  modified_base 21: mod_base = OTHER; note = 2'-O-methylcytidine-3'-phosphorothioate
  modified_base 22: mod_base = OTHER; note = 2'-O-methylcytidine-3'-phosphorothioate
  modified_base 23: mod_base = OTHER; note = 2'-O-methylcytidine-3'-phosphate
tgcactttctgagataccagccc

SEQ ID NO: 1840 - RNA, 23 nt, synthetic construct
  source 1..23: mol_type = other RNA
  modified_base 1: mod_base = OTHER; note Vinyl-phosphonate-2'-O-methyluridine-3'-phosphorothioate
  modified_base 2: mod_base = OTHER; note = 2'-fluoroadenosine-3'-phosphorothioate
  modified_base 3: mod_base = OTHER; note = 2'-O-methylguanosine-3'-phosphate
  modified_base 4: mod_base = OTHER; note = 2'-O-methylguanosine-3'-phosphate
  modified_base 5: mod_base = OTHER; note = 2'-O-methylcytidine-3'-phosphate
  modified_base 6: mod_base = OTHER; note = 2'-fluoroadenosine-3'-phosphate
  modified_base 7: mod_base = OTHER; note = 2'-O-methylcytidine-3'-phosphate
  modified_base 8: mod_base = OTHER; note = 2'-fluorouridine-3'-phosphate
  modified_base 9: mod_base = OTHER; note = 2'-fluorouridine-3'-phosphate
  modified_base 10: mod_base = OTHER; note = 2'-O-methyluridine-3'-phosphate
  modified_base 11: mod_base = OTHER; note = 2'-O-methylcytidine-3'-phosphate
  modified_base 12: mod_base = OTHER; note = 2'-O-methyluridine-3'-phosphate
  modified_base 13: mod_base = OTHER; note = 2'-O-methylguanosine-3'-phosphate
  modified_base 14: mod_base = OTHER; note = 2'-fluoroadenosine-3'-phosphate
  modified_base 15: mod_base = OTHER; note = 2'-O-methylguanosine-3'-phosphate
  modified_base 16: mod_base = OTHER; note = 2'-fluoroadenosine-3'-phosphate
  modified_base 17: mod_base = OTHER; note = 2'-O-methyluridine-3'-phosphate
  modified_base 18: mod_base = OTHER; note = 2'-O-methyladenosine-3'-phosphate
  modified_base 19: mod_base = OTHER; note = 2'-O-methylcytidine-3'-phosphate
  modified_base 20: mod_base = OTHER; note = 2'-O-methylcytidine-3'-phosphate
  modified_base 21: mod_base = OTHER; note = 2'-O-methyladenosine-3'-phosphorothioate
  modified_base 22: mod_base = OTHER; note = 2'-O-methylguanosine-3'-phosphorothioate
  modified_base 23: mod_base = OTHER; note = 2'-O-methylcytidine-3'-phosphate
taggcactttctgagataccagc

SEQ ID NO: 1841 - RNA, 23 nt, synthetic construct
  source 1..23: mol_type = other RNA
  modified_base 1: mod_base = OTHER; note Vinyl-phosphonate-2'-O-methyluridine-3'-phosphorothioate
  modified_base 2: mod_base = OTHER; note = 2'-fluorocytidine-3'-phosphorothioate
  modified_base 3: mod_base = OTHER; note = 2'-O-methyladenosine-3'-phosphate
  modified_base 4: mod_base = OTHER; note = 2'-O-methylguanosine-3'-phosphate
  modified_base 5: mod_base = OTHER; note = 2'-O-methylcytidine-3'-phosphate
  modified_base 6: mod_base = OTHER; note = 2'-fluorouridine-3'-phosphate
  modified_base 7: mod_base = OTHER; note = 2'-O-methyluridine-3'-phosphate
  modified_base 8: mod_base = OTHER; note = 2'-fluoroguanosine-3'-phosphate
  modified_base 9: mod_base = OTHER; note = 2'-fluoroguanosine-3'-phosphate
  modified_base 10: mod_base = OTHER; note = 2'-O-methyluridine-3'-phosphate
  modified_base 11: mod_base = OTHER; note = 2'-O-methyluridine-3'-phosphate
  modified_base 12: mod_base = OTHER; note = 2'-O-methyladenosine-3'-phosphate
  modified_base 13: mod_base = OTHER; note = 2'-O-methylguanosine-3'-phosphate
  modified_base 14: mod_base = OTHER; note = 2'-fluorouridine-3'-phosphate
  modified_base 15: mod_base = OTHER; note = 2'-O-methylguanosine-3'-phosphate
  modified_base 16: mod_base = OTHER; note = 2'-fluorouridine-3'-phosphate
  modified_base 17: mod_base = OTHER; note = 2'-O-methylguanosine-3'-phosphate
  modified_base 18: mod_base = OTHER; note = 2'-O-methyluridine-3'-phosphate
  modified_base 19: mod_base = OTHER; note = 2'-O-methylcytidine-3'-phosphate
  modified_base 20: mod_base = OTHER; note = 2'-O-methyladenosine-3'-phosphate
  modified_base 21: mod_base = OTHER; note = 2'-O-methylguanosine-3'-phosphorothioate
  modified_base 22: mod_base = OTHER; note = 2'-O-methylguanosine-3'-phosphorothioate
  modified_base 23: mod_base = OTHER; note = 2'-O-methylcytidine-3'-phosphate
tcagcttggttagtgtgtcaggc

SEQ ID NO: 1842 - RNA, 23 nt, synthetic construct
  source 1..23: mol_type = other RNA
  modified_base 1: mod_base = OTHER; note Vinyl-phosphonate-2'-O-methyluridine-3'-phosphorothioate
  modified_base 2: mod_base = OTHER; note = 2'-fluoroadenosine-3'-phosphorothioate
  modified_base 3: mod_base = OTHER; note = 2'-O-methyluridine-3'-phosphate
  modified_base 4: mod_base = OTHER; note = 2'-O-methyladenosine-3'-phosphate
  modified_base 5: mod_base = OTHER; note = 2'-O-methylguanosine-3'-phosphate
  modified_base 6: mod_base = OTHER; note = 2'-fluoroguanosine-3'-phosphate
  modified_base 7: mod_base = OTHER; note = 2'-O-methyladenosine-3'-phosphate
  modified_base 8: mod_base = OTHER; note = 2'-fluoroadenosine-3'-phosphate
  modified_base 9: mod_base = OTHER; note = 2'-fluoroadenosine-3'-phosphate
  modified_base 10: mod_base = OTHER; note = 2'-O-methylcytidine-3'-phosphate
  modified_base 11: mod_base = OTHER; note = 2'-O-methyluridine-3'-phosphate
  modified_base 12: mod_base = OTHER; note = 2'-O-methylcytidine-3'-phosphate
  modified_base 13: mod_base = OTHER; note = 2'-O-methyladenosine-3'-phosphate
  modified_base 14: mod_base = OTHER; note = 2'-fluoroguanosine-3'-phosphate
  modified_base 15: mod_base = OTHER; note = 2'-O-methylcytidine-3'-phosphate
  modified_base 16: mod_base = OTHER; note = 2'-fluorouridine-3'-phosphate
  modified_base 17: mod_base = OTHER; note = 2'-O-methyluridine-3'-phosphate
  modified_base 18: mod_base = OTHER; note = 2'-O-methylguanosine-3'-phosphate
  modified_base 19: mod_base = OTHER; note = 2'-O-methylguanosine-3'-phosphate
  modified_base 20: mod_base = OTHER; note = 2'-O-methyluridine-3'-phosphate
  modified_base 21: mod_base = OTHER; note = 2'-O-methyluridine-3'-phosphorothioate
  modified_base 22: mod_base = OTHER; note = 2'-O-methyladenosine-3'-phosphorothioate
  modified_base 23: mod_base = OTHER; note = 2'-O-methylguanosine-3'-phosphate
tataggaaactcagcttggttag

SEQ ID NO: 1843 - RNA, 23 nt, synthetic construct
  source 1..23: mol_type = other RNA
  modified_base 1: mod_base = OTHER; note Vinyl-phosphonate-2'-O-methyluridine-3'-phosphorothioate
  modified_base 2: mod_base = OTHER; note = 2'-fluorocytidine-3'-phosphorothioate
  modified_base 3: mod_base = OTHER; note = 2'-O-methylcytidine-3'-phosphate
  modified_base 4: mod_base = OTHER; note = 2'-O-methyladenosine-3'-phosphate
  modified_base 5: mod_base = OTHER; note = 2'-O-methyluridine-3'-phosphate
  modified_base 6: mod_base = OTHER; note = 2'-fluoroadenosine-3'-phosphate
  modified_base 7: mod_base = OTHER; note = 2'-O-methylguanosine-3'-phosphate
  modified_base 8: mod_base = OTHER; note = 2'-fluoroguanosine-3'-phosphate
  modified_base 9: mod_base = OTHER; note = 2'-fluoroadenosine-3'-phosphate
  modified_base 10: mod_base = OTHER; note = 2'-O-methyladenosine-3'-phosphate
  modified_base 11: mod_base = OTHER; note = 2'-O-methyladenosine-3'-phosphate
  modified_base 12: mod_base = OTHER; note = 2'-O-methylcytidine-3'-phosphate
  modified_base 13: mod_base = OTHER; note = 2'-O-methyluridine-3'-phosphate
  modified_base 14: mod_base = OTHER; note = 2'-fluorocytidine-3'-phosphate
  modified_base 15: mod_base = OTHER; note = 2'-O-methyladenosine-3'-phosphate
  modified_base 16: mod_base = OTHER; note = 2'-fluoroguanosine-3'-phosphate
  modified_base 17: mod_base = OTHER; note = 2'-O-methylcytidine-3'-phosphate
  modified_base 18: mod_base = OTHER; note = 2'-O-methyluridine-3'-phosphate
  modified_base 19: mod_base = OTHER; note = 2'-O-methyluridine-3'-phosphate
  modified_base 20: mod_base = OTHER; note = 2'-O-methylguanosine-3'-phosphate
  modified_base 21: mod_base = OTHER; note = 2'-O-methylguanosine-3'-phosphorothioate
  modified_base 22: mod_base = OTHER; note = 2'-O-methyluridine-3'-phosphorothioate
  modified_base 23: mod_base = OTHER; note = 2'-O-methyluridine-3'-phosphate
tccataggaaactcagcttggtt

SEQ ID NO: 1844 - RNA, 23 nt, synthetic construct
  source 1..23: mol_type = other RNA
  modified_base 1: mod_base = OTHER; note Vinyl-phosphonate-2'-O-methyluridine-3'-phosphorothioate
  modified_base 2: mod_base = OTHER; note = 2'-fluorocytidine-3'-phosphorothioate
  modified_base 3: mod_base = OTHER; note = 2'-O-methylcytidine-3'-phosphate
  modified_base 4: mod_base = OTHER; note = 2'-O-methylcytidine-3'-phosphate
  modified_base 5: mod_base = OTHER; note = 2'-O-methyladenosine-3'-phosphate
  modified_base 6: mod_base = OTHER; note = 2'-fluorouridine-3'-phosphate
  modified_base 7: mod_base = OTHER; note = 2'-O-methyladenosine-3'-phosphate
  modified_base 8: mod_base = OTHER; note = 2'-fluoroguanosine-3'-phosphate
  modified_base 9: mod_base = OTHER; note = 2'-fluoroguanosine-3'-phosphate
  modified_base 10: mod_base = OTHER; note = 2'-O-methyladenosine-3'-phosphate
  modified_base 11: mod_base = OTHER; note = 2'-O-methyladenosine-3'-phosphate
  modified_base 12: mod_base = OTHER; note = 2'-O-methyladenosine-3'-phosphate
  modified_base 13: mod_base = OTHER; note = 2'-O-methylcytidine-3'-phosphate
  modified_base 14: mod_base = OTHER; note = 2'-fluorouridine-3'-phosphate
  modified_base 15: mod_base = OTHER; note = 2'-O-methylcytidine-3'-phosphate
  modified_base 16: mod_base = OTHER; note = 2'-fluoroadenosine-3'-phosphate
  modified_base 17: mod_base = OTHER; note = 2'-O-methylguanosine-3'-phosphate
  modified_base 18: mod_base = OTHER; note = 2'-O-methylcytidine-3'-phosphate
  modified_base 19: mod_base = OTHER; note = 2'-O-methyluridine-3'-phosphate
  modified_base 20: mod_base = OTHER; note = 2'-O-methyluridine-3'-phosphate
  modified_base 21: mod_base = OTHER; note = 2'-O-methylguanosine-3'-phosphorothioate
  modified_base 22: mod_base = OTHER; note = 2'-O-methylguanosine-3'-phosphorothioate
  modified_base 23: mod_base = OTHER; note = 2'-O-methyluridine-3'-phosphate
tcccataggaaactcagcttggt

SEQ ID NO: 1845 - RNA, 23 nt, synthetic construct
  source 1..23: mol_type = other RNA
  modified_base 1: mod_base = OTHER; note Vinyl-phosphonate-2'-O-methyluridine-3'-phosphorothioate
  modified_base 2: mod_base = OTHER; note = 2'-fluorouridine -3'-phosphorothioate
  modified_base 3: mod_base = OTHER; note = 2'-O-methylcytidine-3'-phosphate
  modified_base 4: mod_base = OTHER; note = 2'-O-methylcytidine-3'-phosphate
  modified_base 5: mod_base = OTHER; note = 2'-O-methylcytidine-3'-phosphate
  modified_base 6: mod_base = OTHER; note = 2'-fluoroadenosine-3'-phosphate
  modified_base 7: mod_base = OTHER; note = 2'-O-methyluridine-3'-phosphate
  modified_base 8: mod_base = OTHER; note = 2'-fluoroadenosine-3'-phosphate
  modified_base 9: mod_base = OTHER; note = 2'-fluoroguanosine-3'-phosphate
  modified_base 10: mod_base = OTHER; note = 2'-O-methylguanosine-3'-phosphate
  modified_base 11: mod_base = OTHER; note = 2'-O-methyladenosine-3'-phosphate
  modified_base 12: mod_base = OTHER; note = 2'-O-methyladenosine-3'-phosphate
  modified_base 13: mod_base = OTHER; note = 2'-O-methyladenosine-3'-phosphate
  modified_base 14: mod_base = OTHER; note = 2'-fluorocytidine-3'-phosphate
  modified_base 15: mod_base = OTHER; note = 2'-O-methyluridine-3'-phosphate
  modified_base 16: mod_base = OTHER; note = 2'-fluorocytidine-3'-phosphate
  modified_base 17: mod_base = OTHER; note = 2'-O-methyladenosine-3'-phosphate
  modified_base 18: mod_base = OTHER; note = 2'-O-methylguanosine-3'-phosphate
  modified_base 19: mod_base = OTHER; note = 2'-O-methylcytidine-3'-phosphate
  modified_base 20: mod_base = OTHER; note = 2'-O-methyluridine-3'-phosphate
  modified_base 21: mod_base = OTHER; note = 2'-O-methyluridine-3'-phosphorothioate
  modified_base 22: mod_base = OTHER; note = 2'-O-methylguanosine-3'-phosphorothioate
  modified_base 23: mod_base = OTHER; note = 2'-O-methylguanosine-3'-phosphate
ttcccataggaaactcagcttgg

SEQ ID NO: 1846 - RNA, 23 nt, synthetic construct
  source 1..23: mol_type = other RNA
  modified_base 1: mod_base = OTHER; note Vinyl-phosphonate-2'-O-methyluridine-3'-phosphorothioate
  modified_base 2: mod_base = OTHER; note = 2'-fluorouridine -3'-phosphorothioate
  modified_base 3: mod_base = OTHER; note = 2'-O-methyluridine-3'-phosphate
  modified_base 4: mod_base = OTHER; note = 2'-O-methylcytidine-3'-phosphate
  modified_base 5: mod_base = OTHER; note = 2'-O-methylcytidine-3'-phosphate
  modified_base 6: mod_base = OTHER; note = 2'-fluorocytidine-3'-phosphate
  modified_base 7: mod_base = OTHER; note = 2'-O-methyladenosine-3'-phosphate
  modified_base 8: mod_base = OTHER; note = 2'-fluorouridine-3'-phosphate
  modified_base 9: mod_base = OTHER; note = 2'-fluoroadenosine-3'-phosphate
  modified_base 10: mod_base = OTHER; note = 2'-O-methylguanosine-3'-phosphate
  modified_base 11: mod_base = OTHER; note = 2'-O-methylguanosine-3'-phosphate
  modified_base 12: mod_base = OTHER; note = 2'-O-methyladenosine-3'-phosphate
  modified_base 13: mod_base = OTHER; note = 2'-O-methyladenosine-3'-phosphate
  modified_base 14: mod_base = OTHER; note = 2'-fluoroadenosine-3'-phosphate
  modified_base 15: mod_base = OTHER; note = 2'-O-methylcytidine-3'-phosphate
  modified_base 16: mod_base = OTHER; note = 2'-fluorouridine-3'-phosphate
  modified_base 17: mod_base = OTHER; note = 2'-O-methylcytidine-3'-phosphate
  modified_base 18: mod_base = OTHER; note = 2'-O-methyladenosine-3'-phosphate
  modified_base 19: mod_base = OTHER; note = 2'-O-methylguanosine-3'-phosphate
  modified_base 20: mod_base = OTHER; note = 2'-O-methylcytidine-3'-phosphate
  modified_base 21: mod_base = OTHER; note = 2'-O-methyluridine-3'-phosphorothioate
  modified_base 22: mod_base = OTHER; note = 2'-O-methyluridine-3'-phosphorothioate
  modified_base 23: mod_base = OTHER; note = 2'-O-methylguanosine-3'-phosphate
tttcccataggaaactcagcttg

SEQ ID NO: 1847 - RNA, 23 nt, synthetic construct
  source 1..23: mol_type = other RNA
  modified_base 1: mod_base = OTHER; note Vinyl-phosphonate-2'-O-methyluridine-3'-phosphorothioate
  modified_base 2: mod_base = OTHER; note = 2'-fluoroadenosine-3'-phosphorothioate
  modified_base 3: mod_base = OTHER; note = 2'-O-methylcytidine-3'-phosphate
  modified_base 4: mod_base = OTHER; note = 2'-O-methylcytidine-3'-phosphate
  modified_base 5: mod_base = OTHER; note = 2'-O-methyladenosine-3'-phosphate
  modified_base 6: mod_base = OTHER; note = 2'-fluoroadenosine-3'-phosphate
  modified_base 7: mod_base = OTHER; note = 2'-O-methyladenosine-3'-phosphate
  modified_base 8: mod_base = OTHER; note = 2'-fluoroadenosine-3'-phosphate
  modified_base 9: mod_base = OTHER; note = 2'-fluoroadenosine-3'-phosphate
  modified_base 10: mod_base = OTHER; note = 2'-O-methylguanosine-3'-phosphate
  modified_base 11: mod_base = OTHER; note = 2'-O-methylguanosine-3'-phosphate
  modified_base 12: mod_base = OTHER; note = 2'-O-methyladenosine-3'-phosphate
  modified_base 13: mod_base = OTHER; note = 2'-O-methylcytidine-3'-phosphate
  modified_base 14: mod_base = OTHER; note = 2'-fluorocytidine-3'-phosphate
  modified_base 15: mod_base = OTHER; note = 2'-O-methyladenosine-3'-phosphate
  modified_base 16: mod_base = OTHER; note = 2'-fluoroguanosine-3'-phosphate
  modified_base 17: mod_base = OTHER; note = 2'-O-methyladenosine-3'-phosphate
  modified_base 18: mod_base = OTHER; note = 2'-O-methyladenosine-3'-phosphate
  modified_base 19: mod_base = OTHER; note = 2'-O-methylcytidine-3'-phosphate
  modified_base 20: mod_base = OTHER; note = 2'-O-methyladenosine-3'-phosphate
  modified_base 21: mod_base = OTHER; note = 2'-O-methyladenosine-3'-phosphorothioate
  modified_base 22: mod_base = OTHER; note = 2'-O-methyladenosine-3'-phosphorothioate
  modified_base 23: mod_base = OTHER; note = 2'-O-methyladenosine-3'-phosphate
taccaaaaaggaccagaacaaaa

SEQ ID NO: 1848 - RNA, 23 nt, synthetic construct
  source 1..23: mol_type = other RNA
  modified_base 1: mod_base = OTHER; note Vinyl-phosphonate-2'-O-methyluridine-3'-phosphorothioate
  modified_base 2: mod_base = OTHER; note = 2'-fluoroguanosine-3'-phosphorothioate
  modified_base 3: mod_base = OTHER; note = 2'-O-methyladenosine-3'-phosphate
  modified_base 4: mod_base = OTHER; note = 2'-O-methylcytidine-3'-phosphate
  modified_base 5: mod_base = OTHER; note = 2'-O-methylcytidine-3'-phosphate
  modified_base 6: mod_base = OTHER; note = 2'-fluoroadenosine-3'-phosphate
  modified_base 7: mod_base = OTHER; note = 2'-O-methyladenosine-3'-phosphate
  modified_base 8: mod_base = OTHER; note = 2'-fluoroadenosine-3'-phosphate
  modified_base 9: mod_base = OTHER; note = 2'-fluoroadenosine-3'-phosphate
  modified_base 10: mod_base = OTHER; note = 2'-O-methyladenosine-3'-phosphate
  modified_base 11: mod_base = OTHER; note = 2'-O-methylguanosine-3'-phosphate
  modified_base 12: mod_base = OTHER; note = 2'-O-methylguanosine-3'-phosphate
  modified_base 13: mod_base = OTHER; note = 2'-O-methyladenosine-3'-phosphate
  modified_base 14: mod_base = OTHER; note = 2'-fluorocytidine-3'-phosphate
  modified_base 15: mod_base = OTHER; note = 2'-O-methylcytidine-3'-phosphate
  modified_base 16: mod_base = OTHER; note = 2'-fluoroadenosine-3'-phosphate
  modified_base 17: mod_base = OTHER; note = 2'-O-methylguanosine-3'-phosphate
  modified_base 18: mod_base = OTHER; note = 2'-O-methyladenosine-3'-phosphate
  modified_base 19: mod_base = OTHER; note = 2'-O-methyladenosine-3'-phosphate
  modified_base 20: mod_base = OTHER; note = 2'-O-methylcytidine-3'-phosphate
  modified_base 21: mod_base = OTHER; note = 2'-O-methyladenosine-3'-phosphorothioate
  modified_base 22: mod_base = OTHER; note = 2'-O-methyladenosine-3'-phosphorothioate
  modified_base 23: mod_base = OTHER; note = 2'-O-methyladenosine-3'-phosphate
tgaccaaaaaggaccagaacaaa

SEQ ID NO: 1849 - RNA, 23 nt, synthetic construct
  source 1..23: mol_type = other RNA
  modified_base 1: mod_base = OTHER; note Vinyl-phosphonate-2'-O-methyluridine-3'-phosphorothioate
  modified_base 2: mod_base = OTHER; note = 2'-fluorocytidine-3'-phosphorothioate
  modified_base 3: mod_base = OTHER; note = 2'-O-methylguanosine-3'-phosphate
  modified_base 4: mod_base = OTHER; note = 2'-O-methyladenosine-3'-phosphate
  modified_base 5: mod_base = OTHER; note = 2'-O-methylcytidine-3'-phosphate
  modified_base 6: mod_base = OTHER; note = 2'-fluorocytidine-3'-phosphate
  modified_base 7: mod_base = OTHER; note = 2'-O-methyladenosine-3'-phosphate
  modified_base 8: mod_base = OTHER; note = 2'-fluoroadenosine-3'-phosphate
  modified_base 9: mod_base = OTHER; note = 2'-fluoroadenosine-3'-phosphate
  modified_base 10: mod_base = OTHER; note = 2'-O-methyladenosine-3'-phosphate
  modified_base 11: mod_base = OTHER; note = 2'-O-methyladenosine-3'-phosphate
  modified_base 12: mod_base = OTHER; note = 2'-O-methylguanosine-3'-phosphate
  modified_base 13: mod_base = OTHER; note = 2'-O-methylguanosine-3'-phosphate
  modified_base 14: mod_base = OTHER; note = 2'-fluoroadenosine-3'-phosphate
  modified_base 15: mod_base = OTHER; note = 2'-O-methylcytidine-3'-phosphate
  modified_base 16: mod_base = OTHER; note = 2'-fluorocytidine-3'-phosphate
  modified_base 17: mod_base = OTHER; note = 2'-O-methyladenosine-3'-phosphate
  modified_base 18: mod_base = OTHER; note = 2'-O-methylguanosine-3'-phosphate
  modified_base 19: mod_base = OTHER; note = 2'-O-methyladenosine-3'-phosphate
  modified_base 20: mod_base = OTHER; note = 2'-O-methyladenosine-3'-phosphate
  modified_base 21: mod_base = OTHER; note = 2'-O-methylcytidine-3'-phosphorothioate
  modified_base 22: mod_base = OTHER; note = 2'-O-methyladenosine-3'-phosphorothioate
  modified_base 23: mod_base = OTHER; note = 2'-O-methyladenosine-3'-phosphate
tcgaccaaaaaggaccagaacaa

SEQ ID NO: 1850 - RNA, 23 nt, synthetic construct
  source 1..23: mol_type = other RNA
  modified_base 1: mod_base = OTHER; note Vinyl-phosphonate-2'-O-methyluridine-3'-phosphorothioate
  modified_base 2: mod_base = OTHER; note = 2'-fluorouridine -3'-phosphorothioate
  modified_base 3: mod_base = OTHER; note = 2'-O-methylcytidine-3'-phosphate
  modified_base 4: mod_base = OTHER; note = 2'-O-methylguanosine-3'-phosphate
  modified_base 5: mod_base = OTHER; note = 2'-O-methyladenosine-3'-phosphate
  modified_base 6: mod_base = OTHER; note = 2'-fluorocytidine-3'-phosphate
  modified_base 7: mod_base = OTHER; note = 2'-O-methylcytidine-3'-phosphate
  modified_base 8: mod_base = OTHER; note = 2'-fluoroadenosine-3'-phosphate
  modified_base 9: mod_base = OTHER; note = 2'-fluoroadenosine-3'-phosphate
  modified_base 10: mod_base = OTHER; note = 2'-O-methyladenosine-3'-phosphate
  modified_base 11: mod_base = OTHER; note = 2'-O-methyladenosine-3'-phosphate
  modified_base 12: mod_base = OTHER; note = 2'-O-methyladenosine-3'-phosphate
  modified_base 13: mod_base = OTHER; note = 2'-O-methylguanosine-3'-phosphate
  modified_base 14: mod_base = OTHER; note = 2'-fluoroguanosine-3'-phosphate
  modified_base 15: mod_base = OTHER; note = 2'-O-methyladenosine-3'-phosphate
  modified_base 16: mod_base = OTHER; note = 2'-fluorocytidine-3'-phosphate
  modified_base 17: mod_base = OTHER; note = 2'-O-methylcytidine-3'-phosphate
  modified_base 18: mod_base = OTHER; note = 2'-O-methyladenosine-3'-phosphate
  modified_base 19: mod_base = OTHER; note = 2'-O-methylguanosine-3'-phosphate
  modified_base 20: mod_base = OTHER; note = 2'-O-methyladenosine-3'-phosphate
  modified_base 21: mod_base = OTHER; note = 2'-O-methyladenosine-3'-phosphorothioate
  modified_base 22: mod_base = OTHER; note = 2'-O-methylcytidine-3'-phosphorothioate
  modified_base 23: mod_base = OTHER; note = 2'-O-methyladenosine-3'-phosphate
ttcgaccaaaaaggaccagaaca

SEQ ID NO: 1851 - RNA, 23 nt, synthetic construct
  source 1..23: mol_type = other RNA
  modified_base 1: mod_base = OTHER; note Vinyl-phosphonate-2'-O-methyluridine-3'-phosphorothioate
  modified_base 2: mod_base = OTHER; note = 2'-fluorocytidine-3'-phosphorothioate
  modified_base 3: mod_base = OTHER; note = 2'-O-methyluridine-3'-phosphate
  modified_base 4: mod_base = OTHER; note = 2'-O-methylcytidine-3'-phosphate
  modified_base 5: mod_base = OTHER; note = 2'-O-methylguanosine-3'-phosphate
  modified_base 6: mod_base = OTHER; note = 2'-fluoroadenosine-3'-phosphate
  modified_base 7: mod_base = OTHER; note = 2'-O-methylcytidine-3'-phosphate
  modified_base 8: mod_base = OTHER; note = 2'-fluorocytidine-3'-phosphate
  modified_base 9: mod_base = OTHER; note = 2'-fluoroadenosine-3'-phosphate
  modified_base 10: mod_base = OTHER; note = 2'-O-methyladenosine-3'-phosphate
  modified_base 11: mod_base = OTHER; note = 2'-O-methyladenosine-3'-phosphate
  modified_base 12: mod_base = OTHER; note = 2'-O-methyladenosine-3'-phosphate
  modified_base 13: mod_base = OTHER; note = 2'-O-methyladenosine-3'-phosphate
  modified_base 14: mod_base = OTHER; note = 2'-fluoroguanosine-3'-phosphate
  modified_base 15: mod_base = OTHER; note = 2'-O-methylguanosine-3'-phosphate
  modified_base 16: mod_base = OTHER; note = 2'-fluoroadenosine-3'-phosphate
  modified_base 17: mod_base = OTHER; note = 2'-O-methylcytidine-3'-phosphate
  modified_base 18: mod_base = OTHER; note = 2'-O-methylcytidine-3'-phosphate
  modified_base 19: mod_base = OTHER; note = 2'-O-methyladenosine-3'-phosphate
  modified_base 20: mod_base = OTHER; note = 2'-O-methylguanosine-3'-phosphate
  modified_base 21: mod_base = OTHER; note = 2'-O-methyladenosine-3'-phosphorothioate
  modified_base 22: mod_base = OTHER; note = 2'-O-methyladenosine-3'-phosphorothioate
  modified_base 23: mod_base = OTHER; note = 2'-O-methylcytidine-3'-phosphate
tctcgaccaaaaaggaccagaac

SEQ ID NO: 1852 - RNA, 23 nt, synthetic construct
  source 1..23: mol_type = other RNA
  modified_base 1: mod_base = OTHER; note Vinyl-phosphonate-2'-O-methyluridine-3'-phosphorothioate
  modified_base 2: mod_base = OTHER; note = 2'-fluorocytidine-3'-phosphorothioate
  modified_base 3: mod_base = OTHER; note = 2'-O-methylcytidine-3'-phosphate
  modified_base 4: mod_base = OTHER; note = 2'-O-methyluridine-3'-phosphate
  modified_base 5: mod_base = OTHER; note = 2'-O-methylcytidine-3'-phosphate
  modified_base 6: mod_base = OTHER; note = 2'-fluoroguanosine-3'-phosphate
  modified_base 7: mod_base = OTHER; note = 2'-O-methyladenosine-3'-phosphate
  modified_base 8: mod_base = OTHER; note = 2'-fluorocytidine-3'-phosphate
  modified_base 9: mod_base = OTHER; note = 2'-fluorocytidine-3'-phosphate
  modified_base 10: mod_base = OTHER; note = 2'-O-methyladenosine-3'-phosphate
  modified_base 11: mod_base = OTHER; note = 2'-O-methyladenosine-3'-phosphate
  modified_base 12: mod_base = OTHER; note = 2'-O-methyladenosine-3'-phosphate
  modified_base 13: mod_base = OTHER; note = 2'-O-methyladenosine-3'-phosphate
  modified_base 14: mod_base = OTHER; note = 2'-fluoroadenosine-3'-phosphate
  modified_base 15: mod_base = OTHER; note = 2'-O-methylguanosine-3'-phosphate
  modified_base 16: mod_base = OTHER; note = 2'-fluoroguanosine-3'-phosphate
  modified_base 17: mod_base = OTHER; note = 2'-O-methyladenosine-3'-phosphate
  modified_base 18: mod_base = OTHER; note = 2'-O-methylcytidine-3'-phosphate
  modified_base 19: mod_base = OTHER; note = 2'-O-methylcytidine-3'-phosphate
  modified_base 20: mod_base = OTHER; note = 2'-O-methyladenosine-3'-phosphate
  modified_base 21: mod_base = OTHER; note = 2'-O-methylguanosine-3'-phosphorothioate
  modified_base 22: mod_base = OTHER; note = 2'-O-methyladenosine-3'-phosphorothioate
  modified_base 23: mod_base = OTHER; note = 2'-O-methyladenosine-3'-phosphate
tcctcgaccaaaaaggaccagaa

SEQ ID NO: 1853 - RNA, 23 nt, synthetic construct
  source 1..23: mol_type = other RNA
  modified_base 1: mod_base = OTHER; note Vinyl-phosphonate-2'-O-methyluridine-3'-phosphorothioate
  modified_base 2: mod_base = OTHER; note = 2'-fluorocytidine-3'-phosphorothioate
  modified_base 3: mod_base = OTHER; note = 2'-O-methyladenosine-3'-phosphate
  modified_base 4: mod_base = OTHER; note = 2'-O-methyluridine-3'-phosphate
  modified_base 5: mod_base = OTHER; note = 2'-O-methyluridine-3'-phosphate
  modified_base 6: mod_base = OTHER; note = 2'-fluorouridine-3'-phosphate
  modified_base 7: mod_base = OTHER; note = 2'-O-methylguanosine-3'-phosphate
  modified_base 8: mod_base = OTHER; note = 2'-fluorouridine-3'-phosphate
  modified_base 9: mod_base = OTHER; note = 2'-fluoroadenosine-3'-phosphate
  modified_base 10: mod_base = OTHER; note = 2'-O-methyluridine-3'-phosphate
  modified_base 11: mod_base = OTHER; note = 2'-O-methyluridine-3'-phosphate
  modified_base 12: mod_base = OTHER; note = 2'-O-methylguanosine-3'-phosphate
  modified_base 13: mod_base = OTHER; note = 2'-O-methyluridine-3'-phosphate
  modified_base 14: mod_base = OTHER; note = 2'-fluorouridine-3'-phosphate
  modified_base 15: mod_base = OTHER; note = 2'-O-methyladenosine-3'-phosphate
  modified_base 16: mod_base = OTHER; note = 2'-fluorocytidine-3'-phosphate
  modified_base 17: mod_base = OTHER; note = 2'-O-methyluridine-3'-phosphate
  modified_base 18: mod_base = OTHER; note = 2'-O-methylcytidine-3'-phosphate
  modified_base 19: mod_base = OTHER; note = 2'-O-methylcytidine-3'-phosphate
  modified_base 20: mod_base = OTHER; note = 2'-O-methyluridine-3'-phosphate
  modified_base 21: mod_base = OTHER; note = 2'-O-methylcytidine-3'-phosphorothioate
  modified_base 22: mod_base = OTHER; note = 2'-O-methylguanosine-3'-phosphorothioate
  modified_base 23: mod_base = OTHER; note = 2'-O-methyladenosine-3'-phosphate
tcatttgtattgttactcctcga

SEQ ID NO: 1854 - RNA, 23 nt, synthetic construct
  source 1..23: mol_type = other RNA
  modified_base 1: mod_base = OTHER; note Vinyl-phosphonate-2'-O-methyluridine-3'-phosphorothioate
  modified_base 2: mod_base = OTHER; note = 2'-fluoroguanosine-3'-phosphorothioate
  modified_base 3: mod_base = OTHER; note = 2'-O-methyladenosine-3'-phosphate
  modified_base 4: mod_base = OTHER; note = 2'-O-methyladenosine-3'-phosphate
  modified_base 5: mod_base = OTHER; note = 2'-O-methyluridine-3'-phosphate
  modified_base 6: mod_base = OTHER; note = 2'-fluorouridine-3'-phosphate
  modified_base 7: mod_base = OTHER; note = 2'-O-methyladenosine-3'-phosphate
  modified_base 8: mod_base = OTHER; note = 2'-fluoroguanosine-3'-phosphate
  modified_base 9: mod_base = OTHER; note = 2'-fluorouridine-3'-phosphate
  modified_base 10: mod_base = OTHER; note = 2'-O-methylguanosine-3'-phosphate
  modified_base 11: mod_base = OTHER; note = 2'-O-methyluridine-3'-phosphate
  modified_base 12: mod_base = OTHER; note = 2'-O-methyluridine-3'-phosphate
  modified_base 13: mod_base = OTHER; note = 2'-O-methylcytidine-3'-phosphate
  modified_base 14: mod_base = OTHER; note = 2'-fluorouridine-3'-phosphate
  modified_base 15: mod_base = OTHER; note = 2'-O-methyladenosine-3'-phosphate
  modified_base 16: mod_base = OTHER; note = 2'-fluorocytidine-3'-phosphate
  modified_base 17: mod_base = OTHER; note = 2'-O-methyladenosine-3'-phosphate
  modified_base 18: mod_base = OTHER; note = 2'-O-methylcytidine-3'-phosphate
  modified_base 19: mod_base = OTHER; note = 2'-O-methylcytidine-3'-phosphate
  modified_base 20: mod_base = OTHER; note = 2'-O-methyladenosine-3'-phosphate
  modified_base 21: mod_base = OTHER; note = 2'-O-methyluridine-3'-phosphorothioate
  modified_base 22: mod_base = OTHER; note = 2'-O-methyluridine-3'-phosphorothioate
  modified_base 23: mod_base = OTHER; note = 2'-O-methyladenosine-3'-phosphate
tgaattagtgttctacaccatta

SEQ ID NO: 1855 - RNA, 23 nt, synthetic construct
  source 1..23: mol_type = other RNA
  modified_base 1: mod_base = OTHER; note Vinyl-phosphonate-2'-O-methyluridine-3'-phosphorothioate
  modified_base 2: mod_base = OTHER; note = 2'-fluoroadenosine-3'-phosphorothioate
  modified_base 3: mod_base = OTHER; note = 2'-O-methyluridine-3'-phosphate
  modified_base 4: mod_base = OTHER; note = 2'-O-methylguanosine-3'-phosphate
  modified_base 5: mod_base = OTHER; note = 2'-O-methyladenosine-3'-phosphate
  modified_base 6: mod_base = OTHER; note = 2'-fluoroadenosine-3'-phosphate
  modified_base 7: mod_base = OTHER; note = 2'-O-methyluridine-3'-phosphate
  modified_base 8: mod_base = OTHER; note = 2'-fluorouridine-3'-phosphate
  modified_base 9: mod_base = OTHER; note = 2'-fluoroadenosine-3'-phosphate
  modified_base 10: mod_base = OTHER; note = 2'-O-methylguanosine-3'-phosphate
  modified_base 11: mod_base = OTHER; note = 2'-O-methyluridine-3'-phosphate
  modified_base 12: mod_base = OTHER; note = 2'-O-methylguanosine-3'-phosphate
  modified_base 13: mod_base = OTHER; note = 2'-O-methyluridine-3'-phosphate
  modified_base 14: mod_base = OTHER; note = 2'-fluorouridine-3'-phosphate
  modified_base 15: mod_base = OTHER; note = 2'-O-methylcytidine-3'-phosphate
  modified_base 16: mod_base = OTHER; note = 2'-fluorouridine-3'-phosphate
  modified_base 17: mod_base = OTHER; note = 2'-O-methyladenosine-3'-phosphate
  modified_base 18: mod_base = OTHER; note = 2'-O-methylcytidine-3'-phosphate
  modified_base 19: mod_base = OTHER; note = 2'-O-methyladenosine-3'-phosphate
  modified_base 20: mod_base = OTHER; note = 2'-O-methylcytidine-3'-phosphate
  modified_base 21: mod_base = OTHER; note = 2'-O-methylcytidine-3'-phosphorothioate
  modified_base 22: mod_base = OTHER; note = 2'-O-methyladenosine-3'-phosphorothioate
  modified_base 23: mod_base = OTHER; note = 2'-O-methyluridine-3'-phosphate
tatgaattagtgttctacaccat

SEQ ID NO: 1856 - RNA, 23 nt, synthetic construct
  source 1..23: mol_type = other RNA
  modified_base 1: mod_base = OTHER; note Vinyl-phosphonate-2'-O-methyluridine-3'-phosphorothioate
  modified_base 2: mod_base = OTHER; note = 2'-fluorouridine -3'-phosphorothioate
  modified_base 3: mod_base = OTHER; note = 2'-O-methyladenosine-3'-phosphate
  modified_base 4: mod_base = OTHER; note = 2'-O-methyluridine-3'-phosphate
  modified_base 5: mod_base = OTHER; note = 2'-O-methylguanosine-3'-phosphate
  modified_base 6: mod_base = OTHER; note = 2'-fluoroadenosine-3'-phosphate
  modified_base 7: mod_base = OTHER; note = 2'-O-methyladenosine-3'-phosphate
  modified_base 8: mod_base = OTHER; note = 2'-fluorouridine-3'-phosphate
  modified_base 9: mod_base = OTHER; note = 2'-fluorouridine-3'-phosphate
  modified_base 10: mod_base = OTHER; note = 2'-O-methyladenosine-3'-phosphate
  modified_base 11: mod_base = OTHER; note = 2'-O-methylguanosine-3'-phosphate
  modified_base 12: mod_base = OTHER; note = 2'-O-methyluridine-3'-phosphate
  modified_base 13: mod_base = OTHER; note = 2'-O-methylguanosine-3'-phosphate
  modified_base 14: mod_base = OTHER; note = 2'-fluorouridine-3'-phosphate
  modified_base 15: mod_base = OTHER; note = 2'-O-methyluridine-3'-phosphate
  modified_base 16: mod_base = OTHER; note = 2'-fluorocytidine-3'-phosphate
  modified_base 17: mod_base = OTHER; note = 2'-O-methyluridine-3'-phosphate
  modified_base 18: mod_base = OTHER; note = 2'-O-methyladenosine-3'-phosphate
  modified_base 19: mod_base = OTHER; note = 2'-O-methylcytidine-3'-phosphate
  modified_base 20: mod_base = OTHER; note = 2'-O-methyladenosine-3'-phosphate
  modified_base 21: mod_base = OTHER; note = 2'-O-methylcytidine-3'-phosphorothioate
  modified_base 22: mod_base = OTHER; note = 2'-O-methylcytidine-3'-phosphorothioate
  modified_base 23: mod_base = OTHER; note = 2'-O-methyladenosine-3'-phosphate
ttatgaattagtgttctacacca

SEQ ID NO: 1857 - RNA, 23 nt, synthetic construct
  source 1..23: mol_type = other RNA
  modified_base 1: mod_base = OTHER; note Vinyl-phosphonate-2'-O-methyluridine-3'-phosphorothioate
  modified_base 2: mod_base = OTHER; note = 2'-fluoroguanosine-3'-phosphorothioate
  modified_base 3: mod_base = OTHER; note = 2'-O-methyladenosine-3'-phosphate
  modified_base 4: mod_base = OTHER; note = 2'-O-methyluridine-3'-phosphate
  modified_base 5: mod_base = OTHER; note = 2'-O-methyluridine-3'-phosphate
  modified_base 6: mod_base = OTHER; note = 2'-fluoroadenosine-3'-phosphate
  modified_base 7: mod_base = OTHER; note = 2'-O-methyluridine-3'-phosphate
  modified_base 8: mod_base = OTHER; note = 2'-fluoroguanosine-3'-phosphate
  modified_base 9: mod_base = OTHER; note = 2'-fluoroadenosine-3'-phosphate
  modified_base 10: mod_base = OTHER; note = 2'-O-methyladenosine-3'-phosphate
  modified_base 11: mod_base = OTHER; note = 2'-O-methyluridine-3'-phosphate
  modified_base 12: mod_base = OTHER; note = 2'-O-methyluridine-3'-phosphate
  modified_base 13: mod_base = OTHER; note = 2'-O-methyladenosine-3'-phosphate
  modified_base 14: mod_base = OTHER; note = 2'-fluoroguanosine-3'-phosphate
  modified_base 15: mod_base = OTHER; note = 2'-O-methyluridine-3'-phosphate
  modified_base 16: mod_base = OTHER; note = 2'-fluoroguanosine-3'-phosphate
  modified_base 17: mod_base = OTHER; note = 2'-O-methyluridine-3'-phosphate
  modified_base 18: mod_base = OTHER; note = 2'-O-methyluridine-3'-phosphate
  modified_base 19: mod_base = OTHER; note = 2'-O-methylcytidine-3'-phosphate
  modified_base 20: mod_base = OTHER; note = 2'-O-methyluridine-3'-phosphate
  modified_base 21: mod_base = OTHER; note = 2'-O-methyladenosine-3'-phosphorothioate
  modified_base 22: mod_base = OTHER; note = 2'-O-methylcytidine-3'-phosphorothioate
  modified_base 23: mod_base = OTHER; note = 2'-O-methyladenosine-3'-phosphate
tgattatgaattagtgttctaca

SEQ ID NO: 1858 - RNA, 23 nt, synthetic construct
  source 1..23: mol_type = other RNA
  modified_base 1: mod_base = OTHER; note Vinyl-phosphonate-2'-O-methyluridine-3'-phosphorothioate
  modified_base 2: mod_base = OTHER; note = 2'-fluoroguanosine-3'-phosphorothioate
  modified_base 3: mod_base = OTHER; note = 2'-O-methyluridine-3'-phosphate
  modified_base 4: mod_base = OTHER; note = 2'-O-methylguanosine-3'-phosphate
  modified_base 5: mod_base = OTHER; note = 2'-O-methyladenosine-3'-phosphate
  modified_base 6: mod_base = OTHER; note = 2'-fluorouridine-3'-phosphate
  modified_base 7: mod_base = OTHER; note = 2'-O-methyluridine-3'-phosphate
  modified_base 8: mod_base = OTHER; note = 2'-fluoroadenosine-3'-phosphate
  modified_base 9: mod_base = OTHER; note = 2'-fluorouridine-3'-phosphate
  modified_base 10: mod_base = OTHER; note = 2'-O-methylguanosine-3'-phosphate
  modified_base 11: mod_base = OTHER; note = 2'-O-methyladenosine-3'-phosphate
  modified_base 12: mod_base = OTHER; note = 2'-O-methyladenosine-3'-phosphate
  modified_base 13: mod_base = OTHER; note = 2'-O-methyluridine-3'-phosphate
  modified_base 14: mod_base = OTHER; note = 2'-fluorouridine-3'-phosphate
  modified_base 15: mod_base = OTHER; note = 2'-O-methyladenosine-3'-phosphate
  modified_base 16: mod_base = OTHER; note = 2'-fluoroguanosine-3'-phosphate
  modified_base 17: mod_base = OTHER; note = 2'-O-methyluridine-3'-phosphate
  modified_base 18: mod_base = OTHER; note = 2'-O-methylguanosine-3'-phosphate
  modified_base 19: mod_base = OTHER; note = 2'-O-methyluridine-3'-phosphate
  modified_base 20: mod_base = OTHER; note = 2'-O-methyluridine-3'-phosphate
  modified_base 21: mod_base = OTHER; note = 2'-O-methylcytidine-3'-phosphorothioate
  modified_base 22: mod_base = OTHER; note = 2'-O-methyluridine-3'-phosphorothioate
  modified_base 23: mod_base = OTHER; note = 2'-O-methyladenosine-3'-phosphate
tgtgattatgaattagtgttcta

SEQ ID NO: 1859 - RNA, 23 nt, synthetic construct
  source 1..23: mol_type = other RNA
  modified_base 1: mod_base = OTHER; note Vinyl-phosphonate-2'-O-methyluridine-3'-phosphorothioate
  modified_base 2: mod_base = OTHER; note = 2'-fluorocytidine-3'-phosphorothioate
  modified_base 3: mod_base = OTHER; note = 2'-O-methylcytidine-3'-phosphate
  modified_base 4: mod_base = OTHER; note = 2'-O-methyladenosine-3'-phosphate
  modified_base 5: mod_base = OTHER; note = 2'-O-methylcytidine-3'-phosphate
  modified_base 6: mod_base = OTHER; note = 2'-fluorocytidine-3'-phosphate
  modified_base 7: mod_base = OTHER; note = 2'-O-methyluridine-3'-phosphate
  modified_base 8: mod_base = OTHER; note = 2'-fluoroguanosine-3'-phosphate
  modified_base 9: mod_base = OTHER; note = 2'-fluorocytidine-3'-phosphate
  modified_base 10: mod_base = OTHER; note = 2'-O-methyluridine-3'-phosphate
  modified_base 11: mod_base = OTHER; note = 2'-O-methyluridine-3'-phosphate
  modified_base 12: mod_base = OTHER; note = 2'-O-methyladenosine-3'-phosphate
  modified_base 13: mod_base = OTHER; note = 2'-O-methyluridine-3'-phosphate
  modified_base 14: mod_base = OTHER; note = 2'-fluorouridine-3'-phosphate
  modified_base 15: mod_base = OTHER; note = 2'-O-methyluridine-3'-phosphate
  modified_base 16: mod_base = OTHER; note = 2'-fluorouridine-3'-phosphate
  modified_base 17: mod_base = OTHER; note = 2'-O-methyladenosine-3'-phosphate
  modified_base 18: mod_base = OTHER; note = 2'-O-methyladenosine-3'-phosphate
  modified_base 19: mod_base = OTHER; note = 2'-O-methylguanosine-3'-phosphate
  modified_base 20: mod_base = OTHER; note = 2'-O-methylcytidine-3'-phosphate
  modified_base 21: mod_base = OTHER; note = 2'-O-methyladenosine-3'-phosphorothioate
  modified_base 22: mod_base = OTHER; note = 2'-O-methyluridine-3'-phosphorothioate
  modified_base 23: mod_base = OTHER; note = 2'-O-methyladenosine-3'-phosphate
tccacctgcttattttaagcata

SEQ ID NO: 1860 - RNA, 23 nt, synthetic construct
  source 1..23: mol_type = other RNA
  modified_base 1: mod_base = OTHER; note Vinyl-phosphonate-2'-O-methyluridine-3'-phosphorothioate
  modified_base 2: mod_base = OTHER; note = 2'-fluoroguanosine-3'-phosphorothioate
  modified_base 3: mod_base = OTHER; note = 2'-O-methyladenosine-3'-phosphate
  modified_base 4: mod_base = OTHER; note = 2'-O-methyladenosine-3'-phosphate
  modified_base 5: mod_base = OTHER; note = 2'-O-methyladenosine-3'-phosphate
  modified_base 6: mod_base = OTHER; note = 2'-fluorouridine-3'-phosphate
  modified_base 7: mod_base = OTHER; note = 2'-O-methyladenosine-3'-phosphate
  modified_base 8: mod_base = OTHER; note = 2'-fluoroguanosine-3'-phosphate
  modified_base 9: mod_base = OTHER; note = 2'-fluoroadenosine-3'-phosphate
  modified_base 10: mod_base = OTHER; note = 2'-O-methyluridine-3'-phosphate
  modified_base 11: mod_base = OTHER; note = 2'-O-methylcytidine-3'-phosphate
  modified_base 12: mod_base = OTHER; note = 2'-O-methylcytidine-3'-phosphate
  modified_base 13: mod_base = OTHER; note = 2'-O-methyladenosine-3'-phosphate
  modified_base 14: mod_base = OTHER; note = 2'-fluorocytidine-3'-phosphate
  modified_base 15: mod_base = OTHER; note = 2'-O-methylcytidine-3'-phosphate
  modified_base 16: mod_base = OTHER; note = 2'-fluorouridine-3'-phosphate
  modified_base 17: mod_base = OTHER; note = 2'-O-methylguanosine-3'-phosphate
  modified_base 18: mod_base = OTHER; note = 2'-O-methylcytidine-3'-phosphate
  modified_base 19: mod_base = OTHER; note = 2'-O-methyluridine-3'-phosphate
  modified_base 20: mod_base = OTHER; note = 2'-O-methyluridine-3'-phosphate
  modified_base 21: mod_base = OTHER; note = 2'-O-methyladenosine-3'-phosphorothioate
  modified_base 22: mod_base = OTHER; note = 2'-O-methyluridine-3'-phosphorothioate
  modified_base 23: mod_base = OTHER; note = 2'-O-methyluridine-3'-phosphate
tgaaatagatccacctgcttatt

SEQ ID NO: 1861 - RNA, 23 nt, synthetic construct
  source 1..23: mol_type = other RNA
  modified_base 1: mod_base = OTHER; note Vinyl-phosphonate-2'-O-methyluridine-3'-phosphorothioate
  modified_base 2: mod_base = OTHER; note = 2'-fluoroadenosine-3'-phosphorothioate
  modified_base 3: mod_base = OTHER; note = 2'-O-methyluridine-3'-phosphate
  modified_base 4: mod_base = OTHER; note = 2'-O-methylguanosine-3'-phosphate
  modified_base 5: mod_base = OTHER; note = 2'-O-methyladenosine-3'-phosphate
  modified_base 6: mod_base = OTHER; note = 2'-fluoroadenosine-3'-phosphate
  modified_base 7: mod_base = OTHER; note = 2'-O-methyladenosine-3'-phosphate
  modified_base 8: mod_base = OTHER; note = 2'-fluorouridine-3'-phosphate
  modified_base 9: mod_base = OTHER; note = 2'-fluoroadenosine-3'-phosphate
  modified_base 10: mod_base = OTHER; note = 2'-O-methylguanosine-3'-phosphate
  modified_base 11: mod_base = OTHER; note = 2'-O-methyladenosine-3'-phosphate
  modified_base 12: mod_base = OTHER; note = 2'-O-methyluridine-3'-phosphate
  modified_base 13: mod_base = OTHER; note = 2'-O-methylcytidine-3'-phosphate
  modified_base 14: mod_base = OTHER; note = 2'-fluorocytidine-3'-phosphate
  modified_base 15: mod_base = OTHER; note = 2'-O-methyladenosine-3'-phosphate
  modified_base 16: mod_base = OTHER; note = 2'-fluorocytidine-3'-phosphate
  modified_base 17: mod_base = OTHER; note = 2'-O-methylcytidine-3'-phosphate
  modified_base 18: mod_base = OTHER; note = 2'-O-methyluridine-3'-phosphate
  modified_base 19: mod_base = OTHER; note = 2'-O-methylguanosine-3'-phosphate
  modified_base 20: mod_base = OTHER; note = 2'-O-methylcytidine-3'-phosphate
  modified_base 21: mod_base = OTHER; note = 2'-O-methyluridine-3'-phosphorothioate
  modified_base 22: mod_base = OTHER; note = 2'-O-methyluridine-3'-phosphorothioate
  modified_base 23: mod_base = OTHER; note = 2'-O-methyladenosine-3'-phosphate
tatgaaatagatccacctgctta

SEQ ID NO: 1862 - RNA, 23 nt, synthetic construct
  source 1..23: mol_type = other RNA
  modified_base 1: mod_base = OTHER; note Vinyl-phosphonate-2'-O-methyluridine-3'-phosphorothioate
  modified_base 2: mod_base = OTHER; note = 2'-fluorocytidine-3'-phosphorothioate
  modified_base 3: mod_base = OTHER; note = 2'-O-methyladenosine-3'-phosphate
  modified_base 4: mod_base = OTHER; note = 2'-O-methyluridine-3'-phosphate
  modified_base 5: mod_base = OTHER; note = 2'-O-methylguanosine-3'-phosphate
  modified_base 6: mod_base = OTHER; note = 2'-fluoroadenosine-3'-phosphate
  modified_base 7: mod_base = OTHER; note = 2'-O-methyladenosine-3'-phosphate
  modified_base 8: mod_base = OTHER; note = 2'-fluoroadenosine-3'-phosphate
  modified_base 9: mod_base = OTHER; note = 2'-fluorouridine-3'-phosphate
  modified_base 10: mod_base = OTHER; note = 2'-O-methyladenosine-3'-phosphate
  modified_base 11: mod_base = OTHER; note = 2'-O-methylguanosine-3'-phosphate
  modified_base 12: mod_base = OTHER; note = 2'-O-methyladenosine-3'-phosphate
  modified_base 13: mod_base = OTHER; note = 2'-O-methyluridine-3'-phosphate
  modified_base 14: mod_base = OTHER; note = 2'-fluorocytidine-3'-phosphate
  modified_base 15: mod_base = OTHER; note = 2'-O-methylcytidine-3'-phosphate
  modified_base 16: mod_base = OTHER; note = 2'-fluoroadenosine-3'-phosphate
  modified_base 17: mod_base = OTHER; note = 2'-O-methylcytidine-3'-phosphate
  modified_base 18: mod_base = OTHER; note = 2'-O-methylcytidine-3'-phosphate
  modified_base 19: mod_base = OTHER; note = 2'-O-methyluridine-3'-phosphate
  modified_base 20: mod_base = OTHER; note = 2'-O-methylguanosine-3'-phosphate
  modified_base 21: mod_base = OTHER; note = 2'-O-methylcytidine-3'-phosphorothioate
  modified_base 22: mod_base = OTHER; note = 2'-O-methyluridine-3'-phosphorothioate
  modified_base 23: mod_base = OTHER; note = 2'-O-methyluridine-3'-phosphate
tcatgaaatagatccacctgctt

SEQ ID NO: 1863 - RNA, 23 nt, synthetic construct
  source 1..23: mol_type = other RNA
  modified_base 1: mod_base = OTHER; note Vinyl-phosphonate-2'-O-methyluridine-3'-phosphorothioate
  modified_base 2: mod_base = OTHER; note = 2'-fluoroadenosine-3'-phosphorothioate
  modified_base 3: mod_base = OTHER; note = 2'-O-methyladenosine-3'-phosphate
  modified_base 4: mod_base = OTHER; note = 2'-O-methyladenosine-3'-phosphate
  modified_base 5: mod_base = OTHER; note = 2'-O-methylcytidine-3'-phosphate
  modified_base 6: mod_base = OTHER; note = 2'-fluoroadenosine-3'-phosphate
  modified_base 7: mod_base = OTHER; note = 2'-O-methyluridine-3'-phosphate
  modified_base 8: mod_base = OTHER; note = 2'-fluoroguanosine-3'-phosphate
  modified_base 9: mod_base = OTHER; note = 2'-fluoroadenosine-3'-phosphate
  modified_base 10: mod_base = OTHER; note = 2'-O-methyladenosine-3'-phosphate
  modified_base 11: mod_base = OTHER; note = 2'-O-methyladenosine-3'-phosphate
  modified_base 12: mod_base = OTHER; note = 2'-O-methyluridine-3'-phosphate
  modified_base 13: mod_base = OTHER; note = 2'-O-methyladenosine-3'-phosphate
  modified_base 14: mod_base = OTHER; note = 2'-fluoroguanosine-3'-phosphate
  modified_base 15: mod_base = OTHER; note = 2'-O-methyladenosine-3'-phosphate
  modified_base 16: mod_base = OTHER; note = 2'-fluorouridine-3'-phosphate
  modified_base 17: mod_base = OTHER; note = 2'-O-methylcytidine-3'-phosphate
  modified_base 18: mod_base = OTHER; note = 2'-O-methylcytidine-3'-phosphate
  modified_base 19: mod_base = OTHER; note = 2'-O-methyladenosine-3'-phosphate
  modified_base 20: mod_base = OTHER; note = 2'-O-methylcytidine-3'-phosphate
  modified_base 21: mod_base = OTHER; note = 2'-O-methylcytidine-3'-phosphorothioate
  modified_base 22: mod_base = OTHER; note = 2'-O-methyluridine-3'-phosphorothioate
  modified_base 23: mod_base = OTHER; note = 2'-O-methylguanosine-3'-phosphate
taaacatgaaatagatccacctg

SEQ ID NO: 1864 - RNA, 23 nt, synthetic construct
  source 1..23: mol_type = other RNA
  modified_base 1: mod_base = OTHER; note Vinyl-phosphonate-2'-O-methyluridine-3'-phosphorothioate
  modified_base 2: mod_base = OTHER; note = 2'-fluoroadenosine-3'-phosphorothioate
  modified_base 3: mod_base = OTHER; note = 2'-O-methyladenosine-3'-phosphate
  modified_base 4: mod_base = OTHER; note = 2'-O-methyladenosine-3'-phosphate
  modified_base 5: mod_base = OTHER; note = 2'-O-methyladenosine-3'-phosphate
  modified_base 6: mod_base = OTHER; note = 2'-fluorocytidine-3'-phosphate
  modified_base 7: mod_base = OTHER; note = 2'-O-methyladenosine-3'-phosphate
  modified_base 8: mod_base = OTHER; note = 2'-fluorouridine-3'-phosphate
  modified_base 9: mod_base = OTHER; note = 2'-fluoroguanosine-3'-phosphate
  modified_base 10: mod_base = OTHER; note = 2'-O-methyladenosine-3'-phosphate
  modified_base 11: mod_base = OTHER; note = 2'-O-methyladenosine-3'-phosphate
  modified_base 12: mod_base = OTHER; note = 2'-O-methyladenosine-3'-phosphate
  modified_base 13: mod_base = OTHER; note = 2'-O-methyluridine-3'-phosphate
  modified_base 14: mod_base = OTHER; note = 2'-fluoroadenosine-3'-phosphate
  modified_base 15: mod_base = OTHER; note = 2'-O-methylguanosine-3'-phosphate
  modified_base 16: mod_base = OTHER; note = 2'-fluoroadenosine-3'-phosphate
  modified_base 17: mod_base = OTHER; note = 2'-O-methyluridine-3'-phosphate
  modified_base 18: mod_base = OTHER; note = 2'-O-methylcytidine-3'-phosphate
  modified_base 19: mod_base = OTHER; note = 2'-O-methylcytidine-3'-phosphate
  modified_base 20: mod_base = OTHER; note = 2'-O-methyladenosine-3'-phosphate
  modified_base 21: mod_base = OTHER; note = 2'-O-methylcytidine-3'-phosphorothioate
  modified_base 22: mod_base = OTHER; note = 2'-O-methylcytidine-3'-phosphorothioate
  modified_base 23: mod_base = OTHER; note = 2'-O-methyluridine-3'-phosphate
taaaacatgaaatagatccacct

SEQ ID NO: 1865 - RNA, 23 nt, synthetic construct
  source 1..23: mol_type = other RNA
  modified_base 1: mod_base = OTHER; note Vinyl-phosphonate-2'-O-methyluridine-3'-phosphorothioate
  modified_base 2: mod_base = OTHER; note = 2'-fluorocytidine-3'-phosphorothioate
  modified_base 3: mod_base = OTHER; note = 2'-O-methyladenosine-3'-phosphate
  modified_base 4: mod_base = OTHER; note = 2'-O-methyladenosine-3'-phosphate
  modified_base 5: mod_base = OTHER; note = 2'-O-methyladenosine-3'-phosphate
  modified_base 6: mod_base = OTHER; note = 2'-fluoroadenosine-3'-phosphate
  modified_base 7: mod_base = OTHER; note = 2'-O-methyladenosine-3'-phosphate
  modified_base 8: mod_base = OTHER; note = 2'-fluorocytidine-3'-phosphate
  modified_base 9: mod_base = OTHER; note = 2'-fluoroadenosine-3'-phosphate
  modified_base 10: mod_base = OTHER; note = 2'-O-methyluridine-3'-phosphate
  modified_base 11: mod_base = OTHER; note = 2'-O-methylguanosine-3'-phosphate
  modified_base 12: mod_base = OTHER; note = 2'-O-methyladenosine-3'-phosphate
  modified_base 13: mod_base = OTHER; note = 2'-O-methyladenosine-3'-phosphate
  modified_base 14: mod_base = OTHER; note = 2'-fluoroadenosine-3'-phosphate
  modified_base 15: mod_base = OTHER; note = 2'-O-methyluridine-3'-phosphate
  modified_base 16: mod_base = OTHER; note = 2'-fluoroadenosine-3'-phosphate
  modified_base 17: mod_base = OTHER; note = 2'-O-methylguanosine-3'-phosphate
  modified_base 18: mod_base = OTHER; note = 2'-O-methyladenosine-3'-phosphate
  modified_base 19: mod_base = OTHER; note = 2'-O-methyluridine-3'-phosphate
  modified_base 20: mod_base = OTHER; note = 2'-O-methylcytidine-3'-phosphate
  modified_base 21: mod_base = OTHER; note = 2'-O-methylcytidine-3'-phosphorothioate
  modified_base 22: mod_base = OTHER; note = 2'-O-methyladenosine-3'-phosphorothioate
  modified_base 23: mod_base = OTHER; note = 2'-O-methylcytidine-3'-phosphate
tcaaaaacatgaaatagatccac

SEQ ID NO: 1866 - RNA, 23 nt, synthetic construct
  source 1..23: mol_type = other RNA
  modified_base 1: mod_base = OTHER; note Vinyl-phosphonate-2'-O-methyluridine-3'-phosphorothioate
  modified_base 2: mod_base = OTHER; note = 2'-fluorocytidine-3'-phosphorothioate
  modified_base 3: mod_base = OTHER; note = 2'-O-methyluridine-3'-phosphate
  modified_base 4: mod_base = OTHER; note = 2'-O-methyluridine-3'-phosphate
  modified_base 5: mod_base = OTHER; note = 2'-O-methyladenosine-3'-phosphate
  modified_base 6: mod_base = OTHER; note = 2'-fluorocytidine-3'-phosphate
  modified_base 7: mod_base = OTHER; note = 2'-O-methyluridine-3'-phosphate
  modified_base 8: mod_base = OTHER; note = 2'-fluoroguanosine-3'-phosphate
  modified_base 9: mod_base = OTHER; note = 2'-fluoroadenosine-3'-phosphate
  modified_base 10: mod_base = OTHER; note = 2'-O-methyluridine-3'-phosphate
  modified_base 11: mod_base = OTHER; note = 2'-O-methyluridine-3'-phosphate
  modified_base 12: mod_base = OTHER; note = 2'-O-methyluridine-3'-phosphate
  modified_base 13: mod_base = OTHER; note = 2'-O-methyladenosine-3'-phosphate
  modified_base 14: mod_base = OTHER; note = 2'-fluorocytidine-3'-phosphate
  modified_base 15: mod_base = OTHER; note = 2'-O-methylcytidine-3'-phosphate
  modified_base 16: mod_base = OTHER; note = 2'-fluorocytidine-3'-phosphate
  modified_base 17: mod_base = OTHER; note = 2'-O-methyluridine-3'-phosphate
  modified_base 18: mod_base = OTHER; note = 2'-O-methyladenosine-3'-phosphate
  modified_base 19: mod_base = OTHER; note = 2'-O-methylcytidine-3'-phosphate
  modified_base 20: mod_base = OTHER; note = 2'-O-methylcytidine-3'-phosphate
  modified_base 21: mod_base = OTHER; note = 2'-O-methylcytidine-3'-phosphorothioate
  modified_base 22: mod_base = OTHER; note = 2'-O-methyladenosine-3'-phosphorothioate
  modified_base 23: mod_base = OTHER; note = 2'-O-methyluridine-3'-phosphate
tcttactgatttaccctacccat

SEQ ID NO: 1867 - RNA, 23 nt, synthetic construct
  source 1..23: mol_type = other RNA
  modified_base 1: mod_base = OTHER; note Vinyl-phosphonate-2'-O-methyluridine-3'-phosphorothioate
  modified_base 2: mod_base = OTHER; note = 2'-fluorocytidine-3'-phosphorothioate
  modified_base 3: mod_base = OTHER; note = 2'-O-methyluridine-3'-phosphate
  modified_base 4: mod_base = OTHER; note = 2'-O-methylcytidine-3'-phosphate
  modified_base 5: mod_base = OTHER; note = 2'-O-methyluridine-3'-phosphate
  modified_base 6: mod_base = OTHER; note = 2'-fluorouridine-3'-phosphate
  modified_base 7: mod_base = OTHER; note = 2'-O-methyladenosine-3'-phosphate
  modified_base 8: mod_base = OTHER; note = 2'-fluorocytidine-3'-phosphate
  modified_base 9: mod_base = OTHER; note = 2'-fluorouridine-3'-phosphate
  modified_base 10: mod_base = OTHER; note = 2'-O-methylguanosine-3'-phosphate
  modified_base 11: mod_base = OTHER; note = 2'-O-methyladenosine-3'-phosphate
  modified_base 12: mod_base = OTHER; note = 2'-O-methyluridine-3'-phosphate
  modified_base 13: mod_base = OTHER; note = 2'-O-methyluridine-3'-phosphate
  modified_base 14: mod_base = OTHER; note = 2'-fluorouridine-3'-phosphate
  modified_base 15: mod_base = OTHER; note = 2'-O-methyladenosine-3'-phosphate
  modified_base 16: mod_base = OTHER; note = 2'-fluorocytidine-3'-phosphate
  modified_base 17: mod_base = OTHER; note = 2'-O-methylcytidine-3'-phosphate
  modified_base 18: mod_base = OTHER; note = 2'-O-methylcytidine-3'-phosphate
  modified_base 19: mod_base = OTHER; note = 2'-O-methyluridine-3'-phosphate
  modified_base 20: mod_base = OTHER; note = 2'-O-methyladenosine-3'-phosphate
  modified_base 21: mod_base = OTHER; note = 2'-O-methylcytidine-3'-phosphorothioate
  modified_base 22: mod_base = OTHER; note = 2'-O-methylcytidine-3'-phosphorothioate
  modified_base 23: mod_base = OTHER; note = 2'-O-methylcytidine-3'-phosphate
tctcttactgatttaccctaccc

SEQ ID NO: 1868 - RNA, 23 nt, synthetic construct
  source 1..23: mol_type = other RNA
  modified_base 1: mod_base = OTHER; note Vinyl-phosphonate-2'-O-methyluridine-3'-phosphorothioate
  modified_base 2: mod_base = OTHER; note = 2'-fluorocytidine-3'-phosphorothioate
  modified_base 3: mod_base = OTHER; note = 2'-O-methylcytidine-3'-phosphate
  modified_base 4: mod_base = OTHER; note = 2'-O-methyluridine-3'-phosphate
  modified_base 5: mod_base = OTHER; note = 2'-O-methylcytidine-3'-phosphate
  modified_base 6: mod_base = OTHER; note = 2'-fluorouridine-3'-phosphate
  modified_base 7: mod_base = OTHER; note = 2'-O-methyluridine-3'-phosphate
  modified_base 8: mod_base = OTHER; note = 2'-fluoroadenosine-3'-phosphate
  modified_base 9: mod_base = OTHER; note = 2'-fluorocytidine-3'-phosphate
  modified_base 10: mod_base = OTHER; note = 2'-O-methyluridine-3'-phosphate
  modified_base 11: mod_base = OTHER; note = 2'-O-methylguanosine-3'-phosphate
  modified_base 12: mod_base = OTHER; note = 2'-O-methyladenosine-3'-phosphate
  modified_base 13: mod_base = OTHER; note = 2'-O-methyluridine-3'-phosphate
  modified_base 14: mod_base = OTHER; note = 2'-fluorouridine-3'-phosphate
  modified_base 15: mod_base = OTHER; note = 2'-O-methyluridine-3'-phosphate
  modified_base 16: mod_base = OTHER; note = 2'-fluoroadenosine-3'-phosphate
  modified_base 17: mod_base = OTHER; note = 2'-O-methylcytidine-3'-phosphate
  modified_base 18: mod_base = OTHER; note = 2'-O-methylcytidine-3'-phosphate
  modified_base 19: mod_base = OTHER; note = 2'-O-methylcytidine-3'-phosphate
  modified_base 20: mod_base = OTHER; note = 2'-O-methyluridine-3'-phosphate
  modified_base 21: mod_base = OTHER; note = 2'-O-methyladenosine-3'-phosphorothioate
  modified_base 22: mod_base = OTHER; note = 2'-O-methylcytidine-3'-phosphorothioate
  modified_base 23: mod_base = OTHER; note = 2'-O-methylcytidine-3'-phosphate
tcctcttactgatttaccctacc

SEQ ID NO: 1869 - RNA, 23 nt, synthetic construct
  source 1..23: mol_type = other RNA
  modified_base 1: mod_base = OTHER; note Vinyl-phosphonate-2'-O-methyluridine-3'-phosphorothioate
  modified_base 2: mod_base = OTHER; note = 2'-fluoroadenosine-3'-phosphorothioate
  modified_base 3: mod_base = OTHER; note = 2'-O-methylcytidine-3'-phosphate
  modified_base 4: mod_base = OTHER; note = 2'-O-methylcytidine-3'-phosphate
  modified_base 5: mod_base = OTHER; note = 2'-O-methyluridine-3'-phosphate
  modified_base 6: mod_base = OTHER; note = 2'-fluorocytidine-3'-phosphate
  modified_base 7: mod_base = OTHER; note = 2'-O-methyluridine-3'-phosphate
  modified_base 8: mod_base = OTHER; note = 2'-fluorouridine-3'-phosphate
  modified_base 9: mod_base = OTHER; note = 2'-fluoroadenosine-3'-phosphate
  modified_base 10: mod_base = OTHER; note = 2'-O-methylcytidine-3'-phosphate
  modified_base 11: mod_base = OTHER; note = 2'-O-methyluridine-3'-phosphate
  modified_base 12: mod_base = OTHER; note = 2'-O-methylguanosine-3'-phosphate
  modified_base 13: mod_base = OTHER; note = 2'-O-methyladenosine-3'-phosphate
  modified_base 14: mod_base = OTHER; note = 2'-fluorouridine-3'-phosphate
  modified_base 15: mod_base = OTHER; note = 2'-O-methyluridine-3'-phosphate
  modified_base 16: mod_base = OTHER; note = 2'-fluorouridine-3'-phosphate
  modified_base 17: mod_base = OTHER; note = 2'-O-methyladenosine-3'-phosphate
  modified_base 18: mod_base = OTHER; note = 2'-O-methylcytidine-3'-phosphate
  modified_base 19: mod_base = OTHER; note = 2'-O-methylcytidine-3'-phosphate
  modified_base 20: mod_base = OTHER; note = 2'-O-methylcytidine-3'-phosphate
  modified_base 21: mod_base = OTHER; note = 2'-O-methyluridine-3'-phosphorothioate
  modified_base 22: mod_base = OTHER; note = 2'-O-methyladenosine-3'-phosphorothioate
  modified_base 23: mod_base = OTHER; note = 2'-O-methylcytidine-3'-phosphate
tacctcttactgatttaccctac

SEQ ID NO: 1870 - RNA, 23 nt, synthetic construct
  source 1..23: mol_type = other RNA
  modified_base 1: mod_base = OTHER; note Vinyl-phosphonate-2'-O-methyluridine-3'-phosphorothioate
  modified_base 2: mod_base = OTHER; note = 2'-fluoroadenosine-3'-phosphorothioate
  modified_base 3: mod_base = OTHER; note = 2'-O-methylcytidine-3'-phosphate
  modified_base 4: mod_base = OTHER; note = 2'-O-methyladenosine-3'-phosphate
  modified_base 5: mod_base = OTHER; note = 2'-O-methylcytidine-3'-phosphate
  modified_base 6: mod_base = OTHER; note = 2'-fluorocytidine-3'-phosphate
  modified_base 7: mod_base = OTHER; note = 2'-O-methyluridine-3'-phosphate
  modified_base 8: mod_base = OTHER; note = 2'-fluorocytidine-3'-phosphate
  modified_base 9: mod_base = OTHER; note = 2'-fluorouridine-3'-phosphate
  modified_base 10: mod_base = OTHER; note = 2'-O-methyluridine-3'-phosphate
  modified_base 11: mod_base = OTHER; note = 2'-O-methyladenosine-3'-phosphate
  modified_base 12: mod_base = OTHER; note = 2'-O-methylcytidine-3'-phosphate
  modified_base 13: mod_base = OTHER; note = 2'-O-methyluridine-3'-phosphate
  modified_base 14: mod_base = OTHER; note = 2'-fluoroguanosine-3'-phosphate
  modified_base 15: mod_base = OTHER; note = 2'-O-methyladenosine-3'-phosphate
  modified_base 16: mod_base = OTHER; note = 2'-fluorouridine-3'-phosphate
  modified_base 17: mod_base = OTHER; note = 2'-O-methyluridine-3'-phosphate
  modified_base 18: mod_base = OTHER; note = 2'-O-methyluridine-3'-phosphate
  modified_base 19: mod_base = OTHER; note = 2'-O-methyladenosine-3'-phosphate
  modified_base 20: mod_base = OTHER; note = 2'-O-methylcytidine-3'-phosphate
  modified_base 21: mod_base = OTHER; note = 2'-O-methylcytidine-3'-phosphorothioate
  modified_base 22: mod_base = OTHER; note = 2'-O-methylcytidine-3'-phosphorothioate
  modified_base 23: mod_base = OTHER; note = 2'-O-methyluridine-3'-phosphate
tacacctcttactgatttaccct

SEQ ID NO: 1871 - RNA, 23 nt, synthetic construct
  source 1..23: mol_type = other RNA
  modified_base 1: mod_base = OTHER; note Vinyl-phosphonate-2'-O-methyluridine-3'-phosphorothioate
  modified_base 2: mod_base = OTHER; note = 2'-fluoroadenosine-3'-phosphorothioate
  modified_base 3: mod_base = OTHER; note = 2'-O-methyladenosine-3'-phosphate
  modified_base 4: mod_base = OTHER; note = 2'-O-methylcytidine-3'-phosphate
  modified_base 5: mod_base = OTHER; note = 2'-O-methyladenosine-3'-phosphate
  modified_base 6: mod_base = OTHER; note = 2'-fluorocytidine-3'-phosphate
  modified_base 7: mod_base = OTHER; note = 2'-O-methylcytidine-3'-phosphate
  modified_base 8: mod_base = OTHER; note = 2'-fluorouridine-3'-phosphate
  modified_base 9: mod_base = OTHER; note = 2'-fluorocytidine-3'-phosphate
  modified_base 10: mod_base = OTHER; note = 2'-O-methyluridine-3'-phosphate
  modified_base 11: mod_base = OTHER; note = 2'-O-methyluridine-3'-phosphate
  modified_base 12: mod_base = OTHER; note = 2'-O-methyladenosine-3'-phosphate
  modified_base 13: mod_base = OTHER; note = 2'-O-methylcytidine-3'-phosphate
  modified_base 14: mod_base = OTHER; note = 2'-fluorouridine-3'-phosphate
  modified_base 15: mod_base = OTHER; note = 2'-O-methylguanosine-3'-phosphate
  modified_base 16: mod_base = OTHER; note = 2'-fluoroadenosine-3'-phosphate
  modified_base 17: mod_base = OTHER; note = 2'-O-methyluridine-3'-phosphate
  modified_base 18: mod_base = OTHER; note = 2'-O-methyluridine-3'-phosphate
  modified_base 19: mod_base = OTHER; note = 2'-O-methyluridine-3'-phosphate
  modified_base 20: mod_base = OTHER; note = 2'-O-methyladenosine-3'-phosphate
  modified_base 21: mod_base = OTHER; note = 2'-O-methylcytidine-3'-phosphorothioate
  modified_base 22: mod_base = OTHER; note = 2'-O-methylcytidine-3'-phosphorothioate
  modified_base 23: mod_base = OTHER; note = 2'-O-methylcytidine-3'-phosphate
taacacctcttactgatttaccc

SEQ ID NO: 1872 - RNA, 23 nt, synthetic construct
  source 1..23: mol_type = other RNA
  modified_base 1: mod_base = OTHER; note Vinyl-phosphonate-2'-O-methyluridine-3'-phosphorothioate
  modified_base 2: mod_base = OTHER; note = 2'-fluoroguanosine-3'-phosphorothioate
  modified_base 3: mod_base = OTHER; note = 2'-O-methylguanosine-3'-phosphate
  modified_base 4: mod_base = OTHER; note = 2'-O-methyladenosine-3'-phosphate
  modified_base 5: mod_base = OTHER; note = 2'-O-methyluridine-3'-phosphate
  modified_base 6: mod_base = OTHER; note = 2'-fluoroadenosine-3'-phosphate
  modified_base 7: mod_base = OTHER; note = 2'-O-methyladenosine-3'-phosphate
  modified_base 8: mod_base = OTHER; note = 2'-fluoroadenosine-3'-phosphate
  modified_base 9: mod_base = OTHER; note = 2'-fluoroadenosine-3'-phosphate
  modified_base 10: mod_base = OTHER; note = 2'-O-methylguanosine-3'-phosphate
  modified_base 11: mod_base = OTHER; note = 2'-O-methylguanosine-3'-phosphate
  modified_base 12: mod_base = OTHER; note = 2'-O-methylcytidine-3'-phosphate
  modified_base 13: mod_base = OTHER; note = 2'-O-methyladenosine-3'-phosphate
  modified_base 14: mod_base = OTHER; note = 2'-fluoroadenosine-3'-phosphate
  modified_base 15: mod_base = OTHER; note = 2'-O-methylcytidine-3'-phosphate
  modified_base 16: mod_base = OTHER; note = 2'-fluorouridine-3'-phosphate
  modified_base 17: mod_base = OTHER; note = 2'-O-methylguanosine-3'-phosphate
  modified_base 18: mod_base = OTHER; note = 2'-O-methylguanosine-3'-phosphate
  modified_base 19: mod_base = OTHER; note = 2'-O-methyluridine-3'-phosphate
  modified_base 20: mod_base = OTHER; note = 2'-O-methyladenosine-3'-phosphate
  modified_base 21: mod_base = OTHER; note = 2'-O-methyladenosine-3'-phosphorothioate
  modified_base 22: mod_base = OTHER; note = 2'-O-methyladenosine-3'-phosphorothioate
  modified_base 23: mod_base = OTHER; note = 2'-O-methylcytidine-3'-phosphate
tggataaaaggcaactggtaaac

SEQ ID NO: 1873 - RNA, 23 nt, synthetic construct
  source 1..23: mol_type = other RNA
  modified_base 1: mod_base = OTHER; note Vinyl-phosphonate-2'-O-methyluridine-3'-phosphorothioate
  modified_base 2: mod_base = OTHER; note = 2'-fluoroguanosine-3'-phosphorothioate
  modified_base 3: mod_base = OTHER; note = 2'-O-methylguanosine-3'-phosphate
  modified_base 4: mod_base = OTHER; note = 2'-O-methylguanosine-3'-phosphate
  modified_base 5: mod_base = OTHER; note = 2'-O-methyladenosine-3'-phosphate
  modified_base 6: mod_base = OTHER; note = 2'-fluorouridine-3'-phosphate
  modified_base 7: mod_base = OTHER; note = 2'-O-methyladenosine-3'-phosphate
  modified_base 8: mod_base = OTHER; note = 2'-fluoroadenosine-3'-phosphate
  modified_base 9: mod_base = OTHER; note = 2'-fluoroadenosine-3'-phosphate
  modified_base 10: mod_base = OTHER; note = 2'-O-methyladenosine-3'-phosphate
  modified_base 11: mod_base = OTHER; note = 2'-O-methylguanosine-3'-phosphate
  modified_base 12: mod_base = OTHER; note = 2'-O-methylguanosine-3'-phosphate
  modified_base 13: mod_base = OTHER; note = 2'-O-methylcytidine-3'-phosphate
  modified_base 14: mod_base = OTHER; note = 2'-fluoroadenosine-3'-phosphate
  modified_base 15: mod_base = OTHER; note = 2'-O-methyladenosine-3'-phosphate
  modified_base 16: mod_base = OTHER; note = 2'-fluorocytidine-3'-phosphate
  modified_base 17: mod_base = OTHER; note = 2'-O-methyluridine-3'-phosphate
  modified_base 18: mod_base = OTHER; note = 2'-O-methylguanosine-3'-phosphate
  modified_base 19: mod_base = OTHER; note = 2'-O-methylguanosine-3'-phosphate
  modified_base 20: mod_base = OTHER; note = 2'-O-methyluridine-3'-phosphate
  modified_base 21: mod_base = OTHER; note = 2'-O-methyladenosine-3'-phosphorothioate
  modified_base 22: mod_base = OTHER; note = 2'-O-methyladenosine-3'-phosphorothioate
  modified_base 23: mod_base = OTHER; note = 2'-O-methyladenosine-3'-phosphate
tgggataaaaggcaactggtaaa

SEQ ID NO: 1874 - RNA, 23 nt, synthetic construct
  source 1..23: mol_type = other RNA
  modified_base 1: mod_base = OTHER; note Vinyl-phosphonate-2'-O-methyluridine-3'-phosphorothioate
  modified_base 2: mod_base = OTHER; note = 2'-fluoroguanosine-3'-phosphorothioate
  modified_base 3: mod_base = OTHER; note = 2'-O-methyluridine-3'-phosphate
  modified_base 4: mod_base = OTHER; note = 2'-O-methyluridine-3'-phosphate
  modified_base 5: mod_base = OTHER; note = 2'-O-methyladenosine-3'-phosphate
  modified_base 6: mod_base = OTHER; note = 2'-fluorocytidine-3'-phosphate
  modified_base 7: mod_base = OTHER; note = 2'-O-methyladenosine-3'-phosphate
  modified_base 8: mod_base = OTHER; note = 2'-fluoroadenosine-3'-phosphate
  modified_base 9: mod_base = OTHER; note = 2'-fluorocytidine-3'-phosphate
  modified_base 10: mod_base = OTHER; note = 2'-O-methyladenosine-3'-phosphate
  modified_base 11: mod_base = OTHER; note = 2'-O-methyladenosine-3'-phosphate
  modified_base 12: mod_base = OTHER; note = 2'-O-methylcytidine-3'-phosphate
  modified_base 13: mod_base = OTHER; note = 2'-O-methyluridine-3'-phosphate
  modified_base 14: mod_base = OTHER; note = 2'-fluorouridine-3'-phosphate
  modified_base 15: mod_base = OTHER; note = 2'-O-methyluridine-3'-phosphate
  modified_base 16: mod_base = OTHER; note = 2'-fluoroguanosine-3'-phosphate
  modified_base 17: mod_base = OTHER; note = 2'-O-methylguanosine-3'-phosphate
  modified_base 18: mod_base = OTHER; note = 2'-O-methylguanosine-3'-phosphate
  modified_base 19: mod_base = OTHER; note = 2'-O-methyladenosine-3'-phosphate
  modified_base 20: mod_base = OTHER; note = 2'-O-methyluridine-3'-phosphate
  modified_base 21: mod_base = OTHER; note = 2'-O-methyladenosine-3'-phosphorothioate
  modified_base 22: mod_base = OTHER; note = 2'-O-methyladenosine-3'-phosphorothioate
  modified_base 23: mod_base = OTHER; note = 2'-O-methyladenosine-3'-phosphate
tgttacaacaactttgggataaa

SEQ ID NO: 1875 - RNA, 23 nt, synthetic construct
  source 1..23: mol_type = other RNA
  modified_base 1: mod_base = OTHER; note Vinyl-phosphonate-2'-O-methyluridine-3'-phosphorothioate
  modified_base 2: mod_base = OTHER; note = 2'-fluorocytidine-3'-phosphorothioate
  modified_base 3: mod_base = OTHER; note = 2'-O-methyladenosine-3'-phosphate
  modified_base 4: mod_base = OTHER; note = 2'-O-methylguanosine-3'-phosphate
  modified_base 5: mod_base = OTHER; note = 2'-O-methylguanosine-3'-phosphate
  modified_base 6: mod_base = OTHER; note = 2'-fluorouridine-3'-phosphate
  modified_base 7: mod_base = OTHER; note = 2'-O-methyluridine-3'-phosphate
  modified_base 8: mod_base = OTHER; note = 2'-fluoroadenosine-3'-phosphate
  modified_base 9: mod_base = OTHER; note = 2'-fluorocytidine-3'-phosphate
  modified_base 10: mod_base = OTHER; note = 2'-O-methyladenosine-3'-phosphate
  modified_base 11: mod_base = OTHER; note = 2'-O-methyladenosine-3'-phosphate
  modified_base 12: mod_base = OTHER; note = 2'-O-methylcytidine-3'-phosphate
  modified_base 13: mod_base = OTHER; note = 2'-O-methyladenosine-3'-phosphate
  modified_base 14: mod_base = OTHER; note = 2'-fluoroadenosine-3'-phosphate
  modified_base 15: mod_base = OTHER; note = 2'-O-methylcytidine-3'-phosphate
  modified_base 16: mod_base = OTHER; note = 2'-fluorouridine-3'-phosphate
  modified_base 17: mod_base = OTHER; note = 2'-O-methyluridine-3'-phosphate
  modified_base 18: mod_base = OTHER; note = 2'-O-methyluridine-3'-phosphate
  modified_base 19: mod_base = OTHER; note = 2'-O-methylguanosine-3'-phosphate
  modified_base 20: mod_base = OTHER; note = 2'-O-methylguanosine-3'-phosphate
  modified_base 21: mod_base = OTHER; note = 2'-O-methylguanosine-3'-phosphorothioate
  modified_base 22: mod_base = OTHER; note = 2'-O-methyladenosine-3'-phosphorothioate
  modified_base 23: mod_base = OTHER; note = 2'-O-methyluridine-3'-phosphate
tcaggttacaacaactttgggat

SEQ ID NO: 1876 - RNA, 23 nt, synthetic construct
  source 1..23: mol_type = other RNA
  modified_base 1: mod_base = OTHER; note Vinyl-phosphonate-2'-O-methyluridine-3'-phosphorothioate
  modified_base 2: mod_base = OTHER; note = 2'-fluorouridine -3'-phosphorothioate
  modified_base 3: mod_base = OTHER; note = 2'-O-methyluridine-3'-phosphate
  modified_base 4: mod_base = OTHER; note = 2'-O-methylcytidine-3'-phosphate
  modified_base 5: mod_base = OTHER; note = 2'-O-methylguanosine-3'-phosphate
  modified_base 6: mod_base = OTHER; note = 2'-fluoroadenosine-3'-phosphate
  modified_base 7: mod_base = OTHER; note = 2'-O-methyladenosine-3'-phosphate
  modified_base 8: mod_base = OTHER; note = 2'-fluorouridine-3'-phosphate
  modified_base 9: mod_base = OTHER; note = 2'-fluorocytidine-3'-phosphate
  modified_base 10: mod_base = OTHER; note = 2'-O-methyladenosine-3'-phosphate
  modified_base 11: mod_base = OTHER; note = 2'-O-methyladenosine-3'-phosphate
  modified_base 12: mod_base = OTHER; note = 2'-O-methyluridine-3'-phosphate
  modified_base 13: mod_base = OTHER; note = 2'-O-methylcytidine-3'-phosphate
  modified_base 14: mod_base = OTHER; note = 2'-fluorocytidine-3'-phosphate
  modified_base 15: mod_base = OTHER; note = 2'-O-methyladenosine-3'-phosphate
  modified_base 16: mod_base = OTHER; note = 2'-fluoroadenosine-3'-phosphate
  modified_base 17: mod_base = OTHER; note = 2'-O-methylcytidine-3'-phosphate
  modified_base 18: mod_base = OTHER; note = 2'-O-methyladenosine-3'-phosphate
  modified_base 19: mod_base = OTHER; note = 2'-O-methylguanosine-3'-phosphate
  modified_base 20: mod_base = OTHER; note = 2'-O-methyluridine-3'-phosphate
  modified_base 21: mod_base = OTHER; note = 2'-O-methyladenosine-3'-phosphorothioate
  modified_base 22: mod_base = OTHER; note = 2'-O-methylguanosine-3'-phosphorothioate
  modified_base 23: mod_base = OTHER; note = 2'-O-methylcytidine-3'-phosphate
tttcgaatcaatccaacagtagc

SEQ ID NO: 1877 - RNA, 23 nt, Homo sapiens
  source 1..23: mol_type = genomic RNA
ggactctggaatccattctggtg

SEQ ID NO: 1878 - RNA, 23 nt, Homo sapiens
  source 1..23: mol_type = genomic RNA
gactctggaatccattctggtgc

SEQ ID NO: 1879 - RNA, 23 nt, Homo sapiens
  source 1..23: mol_type = genomic RNA
gctgctcatcccactaatgtcca

SEQ ID NO: 1880 - RNA, 23 nt, Homo sapiens
  source 1..23: mol_type = genomic RNA
tgctcatcccactaatgtccagc

SEQ ID NO: 1881 - RNA, 23 nt, Homo sapiens
  source 1..23: mol_type = genomic RNA
caagaaggagctaaaatggcagt

SEQ ID NO: 1882 - RNA, 23 nt, Homo sapiens
  source 1..23: mol_type = genomic RNA
aaggagctaaaatggcagtgcgt

SEQ ID NO: 1883 - RNA, 23 nt, Homo sapiens
  source 1..23: mol_type = genomic RNA
cttactggccatctttaagtctg

SEQ ID NO: 1884 - RNA, 23 nt, Homo sapiens
  source 1..23: mol_type = genomic RNA
ctgtgctcttcgtcatctgacca

SEQ ID NO: 1885 - RNA, 23 nt, Homo sapiens
  source 1..23: mol_type = genomic RNA
gggtcctctgtgaacttgctcag

SEQ ID NO: 1886 - RNA, 23 nt, Homo sapiens
  source 1..23: mol_type = genomic RNA
ggtcctctgtgaacttgctcagg

SEQ ID NO: 1887 - RNA, 23 nt, Homo sapiens
  source 1..23: mol_type = genomic RNA
ctatcgttcttttcactctggtg

SEQ ID NO: 1888 - RNA, 23 nt, Homo sapiens
  source 1..23: mol_type = genomic RNA
tatcgttcttttcactctggtgg

SEQ ID NO: 1889 - RNA, 23 nt, Homo sapiens
  source 1..23: mol_type = genomic RNA
cctggtgctgactatccagttga

SEQ ID NO: 1890 - RNA, 23 nt, Homo sapiens
  source 1..23: mol_type = genomic RNA
gtgctgactatccagttgatggg

SEQ ID NO: 1891 - RNA, 23 nt, Homo sapiens
  source 1..23: mol_type = genomic RNA
tgctgactatccagttgatgggc

SEQ ID NO: 1892 - RNA, 23 nt, Homo sapiens
  source 1..23: mol_type = genomic RNA
ctgactatccagttgatgggctg

SEQ ID NO: 1893 - RNA, 23 nt, Homo sapiens
  source 1..23: mol_type = genomic RNA
tgattggcctgtagagttgctga

SEQ ID NO: 1894 - RNA, 23 nt, Homo sapiens
  source 1..23: mol_type = genomic RNA
tgggctggtatctcagaaagtgc

SEQ ID NO: 1895 - RNA, 23 nt, Homo sapiens
  source 1..23: mol_type = genomic RNA
gggctggtatctcagaaagtgcc

SEQ ID NO: 1896 - RNA, 23 nt, Homo sapiens
  source 1..23: mol_type = genomic RNA
gctggtatctcagaaagtgcctg

SEQ ID NO: 1897 - RNA, 23 nt, Homo sapiens
  source 1..23: mol_type = genomic RNA
ctaaccaagctgagtttcctatg

SEQ ID NO: 1898 - RNA, 23 nt, Homo sapiens
  source 1..23: mol_type = genomic RNA
aaccaagctgagtttcctatggg

SEQ ID NO: 1899 - RNA, 23 nt, Homo sapiens
  source 1..23: mol_type = genomic RNA
accaagctgagtttcctatggga

SEQ ID NO: 1900 - RNA, 23 nt, Homo sapiens
  source 1..23: mol_type = genomic RNA
ccaagctgagtttcctatgggaa

SEQ ID NO: 1901 - RNA, 23 nt, Homo sapiens
  source 1..23: mol_type = genomic RNA
ttttgttctggtcctttttggtc

SEQ ID NO: 1902 - RNA, 23 nt, Homo sapiens
  source 1..23: mol_type = genomic RNA
tttgttctggtcctttttggtcg

SEQ ID NO: 1903 - RNA, 23 nt, Homo sapiens
  source 1..23: mol_type = genomic RNA
ttgttctggtcctttttggtcga

SEQ ID NO: 1904 - RNA, 23 nt, Homo sapiens
  source 1..23: mol_type = genomic RNA
tgttctggtcctttttggtcgag

SEQ ID NO: 1905 - RNA, 23 nt, Homo sapiens
  source 1..23: mol_type = genomic RNA
gttctggtcctttttggtcgagg

SEQ ID NO: 1906 - RNA, 23 nt, Homo sapiens
  source 1..23: mol_type = genomic RNA
ttctggtcctttttggtcgagga

SEQ ID NO: 1907 - RNA, 23 nt, Homo sapiens
  source 1..23: mol_type = genomic RNA
tcgaggagtaacaatacaaatgg

SEQ ID NO: 1908 - RNA, 23 nt, Homo sapiens
  source 1..23: mol_type = genomic RNA
tatgcttaaaataagcaggtgga

SEQ ID NO: 1909 - RNA, 23 nt, Homo sapiens
  source 1..23: mol_type = genomic RNA
aataagcaggtggatctatttca

SEQ ID NO: 1910 - RNA, 23 nt, Homo sapiens
  source 1..23: mol_type = genomic RNA
taagcaggtggatctatttcatg

SEQ ID NO: 1911 - RNA, 23 nt, Homo sapiens
  source 1..23: mol_type = genomic RNA
aagcaggtggatctatttcatgt

SEQ ID NO: 1912 - RNA, 23 nt, Homo sapiens
  source 1..23: mol_type = genomic RNA
caggtggatctatttcatgtttt

SEQ ID NO: 1913 - RNA, 23 nt, Homo sapiens
  source 1..23: mol_type = genomic RNA
aggtggatctatttcatgttttt

SEQ ID NO: 1914 - RNA, 23 nt, Homo sapiens
  source 1..23: mol_type = genomic RNA
gtggatctatttcatgtttttga

SEQ ID NO: 1915 - RNA, 23 nt, Homo sapiens
  source 1..23: mol_type = genomic RNA
atgggtagggtaaatcagtaaga

SEQ ID NO: 1916 - RNA, 23 nt, Homo sapiens
  source 1..23: mol_type = genomic RNA
ggtagggtaaatcagtaagaggt

SEQ ID NO: 1917 - RNA, 23 nt, Homo sapiens
  source 1..23: mol_type = genomic RNA
agggtaaatcagtaagaggtgtt

SEQ ID NO: 1918 - RNA, 23 nt, Homo sapiens
  source 1..23: mol_type = genomic RNA
gtttaccagttgccttttatccc

SEQ ID NO: 1919 - RNA, 23 nt, Homo sapiens
  source 1..23: mol_type = genomic RNA
tttaccagttgccttttatccca

SEQ ID NO: 1920 - RNA, 23 nt, Homo sapiens
  source 1..23: mol_type = genomic RNA
tttatcccaaagttgttgtaacc

SEQ ID NO: 1921 - RNA, 23 nt, Homo sapiens
  source 1..23: mol_type = genomic RNA
atcccaaagttgttgtaacctgc

We claim:

1. A double stranded RNA (dsRNA) agent for inhibiting expression of beta-catenin (CTNNB1) in a cell, or a pharmaceutically acceptable salt thereof, comprising a sense strand differing by no more than 4 bases from the nucleotide sequence 5′-usascuguugGfAfUfugauucgasasa-3′ of SEQ ID NO: 20 and an antisense strand differing by no more than 4 bases from the nucleotide sequence 5′-VPudTucdGadAucaadTcCfaacaguasgsc-3′ of SEQ ID NO: 21,
wherein a, g, c and u are 2′-O-methyl (2′-OMe) A, G, C, and U, respectively; Af, Gf, Cf, and Uf are 2′-fluoro A, G, C and U, respectively; s is a phosphorothioate linkage; VP is a vinyl phosphonate; dT is 2′-deoxythimidine-3′-phosphate; dG is 2′-deoxyguanosine-3′-phosphate; and dA is 2′-deoxyadenosine-3′-phosphate.

2. The dsRNA agent, or a pharmaceutically acceptable salt thereof, of claim 1, wherein the sense strand differs by no more than 3 bases from the nucleotide sequence 5′-usascuguugGfAfUfugauucgasasa-3′ of SEQ ID NO: 20 and the antisense strand differs by no more than 3 bases from the nucleotide sequence 5′-VPudTucdGadAucaadTcCfaacaguasgsc-3′ of SEQ ID NO: 21.

3. The dsRNA agent, or a pharmaceutically acceptable salt thereof, of claim 1, wherein the sense strand differs by no more than 2 bases from the nucleotide sequence 5′-usascuguugGfAfUfugauucgasasa-3′ of SEQ ID NO: 20 and the antisense strand differs by no more than 2 bases from the nucleotide sequence 5′-VPudTucdGadAucaadTcCfaacaguasgsc-3′ of SEQ ID NO: 21.

4. The dsRNA agent, or a pharmaceutically acceptable salt thereof, of claim 1, wherein the sense strand differs by no more than 1 base from the nucleotide sequence 5′-usascuguugGfAfUfugauucgasasa-3′ of SEQ ID NO: 20 and the antisense strand differs by no more than 1 base from the nucleotide sequence 5′-VPudTucdGadAucaadTcCfaacaguasgsc-3′ of SEQ ID NO: 21.

5. The dsRNA agent, or a pharmaceutically acceptable salt thereof, of claim 1, wherein the sense strand comprises the nucleotide sequence 5′-usascuguugGfAfUfugauucgasasa-3′ of SEQ ID NO: 20 and the antisense strand comprises the nucleotide sequence 5′-VPudTucdGadAucaadTcCfaacaguasgsc-3′ of SEQ ID NO: 21.

6. The dsRNA agent, or a pharmaceutically acceptable salt thereof, of claim 1, wherein the sense strand consists of the nucleotide sequence 5′-usascuguugGfAfUfugauucgasasa-3′ of SEQ ID NO: 20 and the antisense strand consists of the nucleotide sequence 5′-VPudTucdGadAucaadTcCfaacaguasgsc-3′ of SEQ ID NO: 21.

7. A double stranded RNA (dsRNA) agent for inhibiting expression of beta-catenin (CTNNB1) in a cell, or a pharmaceutically acceptable salt thereof, comprising a sense strand comprising the nucleotide sequence 5′-usascuguugGfAfUfugauucgasasa-3′ of SEQ ID NO: 20 and an antisense strand comprising the nucleotide sequence 5′-VPudTucdGadAucaadTcCfaacaguasgsc-3′ of SEQ ID NO: 21,
wherein a, g, c and u are 2′-O-methyl (2′-OMe) A, G, C, and U respectively; Af, Gf, Cf and Uf are 2′-fluoro A, G, C and U respectively; s is a phosphorothioate linkage; VP is a vinyl phosphonate; dT is 2′-deoxythimidine-3′-phosphate; dG is 2′-deoxyguanosine-3′-phosphate; and dA is 2′-deoxyadenosine-3′-phosphate.

8. A pharmaceutical composition comprising the dsRNA agent, or a pharmaceutically acceptable salt thereof, of claim 1 and a pharmaceutically acceptable carrier.

9. The pharmaceutical composition of claim 8, wherein the dsRNA agent, or a pharmaceutically acceptable salt thereof, is in an unbuffered solution.

10. The pharmaceutical composition of claim 9, wherein the unbuffered solution is saline or water.

11. The pharmaceutical composition of claim 8, wherein the dsRNA agent, or a pharmaceutically acceptable salt thereof, is in a buffer solution.

12. The pharmaceutical composition of claim 11, wherein the buffer solution comprises acetate, citrate, prolamine, carbonate, or phosphate or any combination thereof.

13. The pharmaceutical composition of claim 11, wherein the buffer solution is phosphate buffered saline (PBS).

14. A pharmaceutical composition comprising the dsRNA agent, or a pharmaceutically acceptable salt thereof, of claim 1 and a lipid.

15. The pharmaceutical composition of claim 14, wherein the lipid is a cationic lipid.

16. The pharmaceutical composition of claim 15, wherein the cationic lipid comprises one or more biodegradable groups.

17. The pharmaceutical composition of claim 16, wherein the lipid comprises the structure

[chemical structure]

18. The pharmaceutical composition of claim 17, comprising
(a) [chemical structure]
(b) cholesterol;
(c) distearoylphosphatidylcholine (DSPC); and
(d) 1,2-Dimyristoyl-rac-glycero-3-methoxypolyethylene glycol (PEG-DMG).

19. The pharmaceutical composition of claim 18, wherein the [chemical structure]
DSPC, cholesterol, and PEG-DMG are present in a molar ratio of 50:12:36:2, respectively.

20. A pharmaceutical composition comprising a dsRNA agent for inhibiting expression of a gene encoding beta-catenin (CTNNB1), or a pharmaceutically acceptable salt thereof,
wherein the dsRNA agent, or a pharmaceutically acceptable salt thereof, comprises a sense strand differing by no more than 4 bases from the nucleotide sequence 5′-usascuguugGfAfUfugauucgasasa-3′ of SEQ ID NO: 20 and an antisense strand differing by no more than 4 bases from the nucleotide sequence 5′-VPudTucdGadAucaadTcCfaacaguasgsc-3′ of SEQ ID NO: 21,
wherein a, g, c and u are 2′-O-methyl (2′-OMe) A, G, C, and U respectively; Af, Gf, Cf and Uf are 2′-fluoro A, G, C and U respectively; s is a phosphorothioate linkage; VP is a vinyl phosphonate; dT is 2′-deoxythimidine-3′-phosphate; dG is 2′-deoxyguanosine-3′-phosphate; and dA is 2′-deoxyadenosine-3′-phosphate; and
a lipid.

21. The pharmaceutical composition of claim 20, wherein the sense strand differs by no more than 3 bases from the nucleotide sequence 5′-usascuguugGfAfUfugauucgasasa-3′ of SEQ ID NO: 20 and the antisense strand differs by no more than 3 bases from the nucleotide sequence 5′-VPudTucdGadAucaadTcCfaacaguasgsc-3′ of SEQ ID NO: 21.

22. The pharmaceutical composition of claim 20, wherein the sense strand differs by no more than 2 bases from the nucleotide sequence 5′-usascuguugGfAfUfugauucgasasa-3′ of SEQ ID NO: 20 and the antisense strand differs by no more than 2 bases from the nucleotide sequence 5′-VPudTucdGadAucaadTcCfaacaguasgsc-3′ of SEQ ID NO: 21.

23. The pharmaceutical composition of claim 20, wherein the sense strand differs by no more than 1 base from the nucleotide sequence 5′-usascuguugGfAfUfugauucgasasa-3′ of SEQ ID NO: 20 and the antisense strand differs by no more than 1 base from the nucleotide sequence 5′-VPudTucdGadAucaadTcCfaacaguasgsc-3′ of SEQ ID NO: 21.

24. The pharmaceutical composition of claim 20, wherein the sense strand comprises the nucleotide sequence 5′-usascuguugGfAfUfugauucgasasa-3′ of SEQ ID NO: 20 and the antisense strand comprises the nucleotide sequence 5′-VPudTucdGadAucaadTcCfaacaguasgsc-3′ of SEQ ID NO: 21.

25. The pharmaceutical composition of claim 20, wherein the lipid is a cationic lipid.

26. The pharmaceutical composition of claim 25, wherein the cationic lipid comprises one or more biodegradable groups.

27. The pharmaceutical composition of claim 26, wherein the lipid comprises the structure

[chemical structure]

28. The pharmaceutical composition of claim 27, comprising
(a) [chemical structure]
(b) cholesterol;
(c) distearoylphosphatidylcholine (DSPC); and
(d) 1,2-Dimyristoyl-rac-glycero-3-methoxypolyethylene glycol (PEG-DMG).

29. The pharmaceutical composition of claim 28, wherein the [chemical structure]
DSPC, cholesterol, and PEG-DMG are present in a molar ratio of 50:12:36:2 respectively.

30. A pharmaceutical composition comprising
(a) a dsRNA agent for inhibiting expression of a gene encoding beta-catenin (CTNNB1), or a pharmaceutically acceptable salt thereof,
wherein the dsRNA agent consists of a sense strand consisting of the nucleotide sequence 5′-usascuguugGfAfUfugauucgasasa-3′ of SEQ ID NO: 20) and an antisense strand consisting of the nucleotide sequence 5′-VPudTucdGadAucaadTcCfaacaguasgsc-3′ of SEQ ID NO: 21,
wherein a, g, c and u are 2′-O-methyl (2′-OMe) A, G, C, and U respectively; Af, Gf, Cf and Uf are 2′-fluoro A, G, C and U respectively; s is a phosphorothioate linkage; VP is a vinyl phosphonate; dT is 2′-deoxythimidine-3′-phosphate; dG is 2-deoxyguanosine-3′-phosphate; and dA is 2-deoxyadenosine-3′-phosphate;
(b) a lipid comprising the structure [chemical structure]
(c) cholesterol;
(d) distearoylphosphatidylcholine (DSPC); and
(e) 1,2-Dimyristoyl-rac-glycero-3-methoxypolyethylene glycol (PEG-DMG), wherein the [chemical structure]
DSPC, cholesterol, and PEG-DMG are present in a molar ratio of 50:12:36:2 respectively.
